(19) United States
(12) Patent Application Publication
(10) Pub. No.: US 2023/0074800 A1
(43) Pub. Date: Mar. 9, 2023

(54) CAR-T CELL THERAPIES WITH ENHANCED EFFICACY

(71) Applicants: Novartis AG, Basel (CH); The Trustees of the University of Pennsylvania, Philadelphia, PA (US)

(72) Inventors: Shelley L. Berger, Philadelphia, PA (US); Katherine Ann Alexander, Philadelphia, PA (US); Sierra Marie McDonald, Philadelphia, PA (US)

(21) Appl. No.: 17/441,576

(22) PCT Filed: Mar. 20, 2020
(86) PCT No.: PCT/US2020/023916

§ 371 Date: Sep. 21, 2021

Related U.S. Application Data
(60) Provisional application No. 62/821,848, filed on Mar. 21, 2019.

(51) Int. Cl. C07K 14/47; A61K 35/17; C12N 5/0783; A61P 35/02; C12N 15/86

(52) U.S. Cl. CPC C07K 14/4705; A61K 35/17; A61K 48/00; A61P 35/02; C12N 15/86; C12N 5/0636

(57) ABSTRACT

The invention provides compositions and methods for treating diseases such as cancer. The invention also relates to methods of making improved CART cell therapies, e.g., with increased level, expression, and/or activity of a TOX family protein, e.g., a TOX2 protein. The invention further provides TOX2 protein and TOX2 modulators, and methods of use of the same in connection with CART cells.

### CROSS REFERENCE TO RELATED APPLICATIONS

[0001] This application claims priority to U.S. Application Ser. No. 62/821,848, filed Mar. 21, 2019, the contents of which are incorporated herein by reference in their entireties.

### SEQUENCE LISTING

[0002] The instant application contains a Sequence Listing which has been submitted electronically in ASCII format and is hereby incorporated by reference in its entirety. Said ASCII copy, created on Mar. 16, 2020, is named N2067-7164WO_SL.txt and is 2,051,385 bytes in size.

### FIELD OF THE INVENTION

[0003] The present invention relates generally to methods of making Chimeric Antigen Receptor (CAR) expressing immune effector cells (e.g., T cells, or NK cells), and compositions and reaction mixtures comprising the same.

### BACKGROUND OF THE INVENTION

[0004] Recent developments using chimeric antigen receptor (CAR) modified T cell (CART) therapy, which relies on redirecting T cells to a suitable cell-surface molecule on cancer cells, show promising results in harnessing the power of the immune system to treat cancers (see, e.g., Sadelain et al., Cancer Discovery 3:388-398 (2013)). Given the ongoing need for improved strategies for targeting diseases such as cancer, new compositions and methods for improving CART therapies are highly desirable.

### SUMMARY OF THE INVENTION

[0005] The present disclosure pertains to, inter alia, compositions comprising CAR-expressing immune effector cells (e.g., T cells, or NK cells), which immune effector cells are treated and/or genetically engineered to have an increased level, expression, and/or activity of a TOX-family protein (“TOX^{hi} CAR cell”). The disclosure also provides, in some embodiments, methods of making said CAR-expressing immune effector cells, and uses thereof, e.g., to treat a subject having a cancer. In some embodiments, the level, expression, and/or activity of a TOX family protein, e.g., a TOX2 protein, in said immune effector cell is increased compared to a control cell, e.g., as described herein. Described herein are also TOX2 proteins and TOX2 modulators that can be used to make a TOX^{hi} CAR cell, or a population of said cells.

[0006] In some embodiments, provided herein is, a modified immune effector cell

[0007] (a) genetically engineered to express a chimeric antigen receptor (CAR) comprising an antigen-binding domain, a transmembrane domain, and an intracellular signaling domain; and

[0008] (b) treated and/or genetically engineered to have an increased level, expression, and/or activity of a TOX family protein (“TOXhi CAR cell”),

[0009] wherein the level, expression, and/or activity of the TOX family protein in said TOXhi CAR cell is increased compared to a control cell, e.g., an immune effector cell having the following:

[0010] (i) a CAR-expressing immune effector cell, which is not treated and/or is not genetically engineered to have an increased level, expression, and/or activity of a TOX family protein as recited in (b); or

[0011] (ii) a non-CAR expressing immune effector cell, which is not treated and/or is not genetically engineered to have an increased level, expression, and/or activity of a TOX family protein as recited in (b).

[0012] In some embodiments, the TOX family protein is chosen from a TOX protein, TOX2 protein, TOX3 protein or TOX4 protein, e.g., a human TOX protein, TOX2 protein, TOX3 protein, or TOX4 protein.

[0013] In some embodiments, the TOX family protein is a TOX2 protein, e.g., as described herein.

[0014] In some embodiments, the TOX^{hi} CAR cell comprises a recombinant TOX2 nucleic acid molecule encoding a TOX2 protein, e.g., a recombinant TOX2 nucleic acid molecule encoding an amino acid sequence having at least 85%, 90%, 95%, 96%, 97%, 98% or 99% identity to SEQ ID NO: 2000, SEQ ID NO: 2001, SEQ ID NO: 2002 or SEQ ID NO: 2003, or a functional fragment thereof. In some embodiments, the recombinant TOX2 nucleic acid molecule encodes an amino acid having the sequence of SEQ ID NO: 2000, SEQ ID NO: 2001, SEQ ID NO: 2002 or SEQ ID NO: 2003, or a functional fragment thereof. In some embodiments, the recombinant TOX2 nucleic acid molecule is expressed in the immune effector cell.

[0015] In some embodiments, the TOX^{hi} CAR cell comprises a TOX family protein comprising a TOX2 protein comprising an amino acid sequence having at least 85%, 90%, 95%, 96%, 97%, 98% or 99% identity to SEQ ID NO: 2000, SEQ ID NO: 2001, SEQ ID NO: 2002 or SEQ ID NO: 2003, or a functional fragment thereof. In some embodiments, the TOX2 protein comprises an amino acid having the sequence of SEQ ID NO: 2000, SEQ ID NO: 2001, SEQ ID NO: 2002 or SEQ ID NO: 2003, or a functional fragment thereof.

[0016] In some embodiments, the treating comprises contacting the cell with a TOX family protein modulator, e.g., an agent which increases the level, expression, and/or activity of a TOX family protein.

[0017] In some embodiments, the cell is genetically engineered to have an increased level, expression, and/or activity of a TOX family protein.

[0018] In some embodiments, the treating comprises contacting the cell with a TOX family protein modulator, e.g., an agent which increases the level, expression, and/or activity of a TOX family protein, e.g., TOX2 protein.

[0019] In some embodiments, the treating, e.g., contacting, occurs in vivo, in vitro, or ex vivo.

[0020] In some embodiments, provided herein is a population of modified immune effector cells genetically engineered to express a chimeric antigen receptor (CAR), said population of immune effector cells treated and/or genetically engineered to have an increased level, expression, and/or activity of a TOX family protein (“TOX^{hi} CAR cell population”), wherein the level, expression, and/or activity of the TOX family protein in TOX^{hi} CAR cell population is increased compared to a control cell, e.g., as described herein. In some embodiments, the CAR comprises an antigen-binding domain, a transmembrane domain, and an intracellular signaling domain.

[0021] In some embodiments, the TOX family protein is chosen from a TOX molecule, TOX2 protein, TOX3 protein or TOX4 protein, e.g., a human TOX protein, TOX2 protein, TOX3 protein or TOX4 protein.

[0022] In some embodiments, the TOX family protein is a TOX2 protein, e.g., as described herein.

[0023] In some embodiments, the TOX^{hi} CAR cell population is treated and/or genetically engineered with a TOX protein, e.g., a TOX2 protein.

[0024] In some embodiments, the TOX^{hi} CAR cell population is treated and/or genetically engineered with a TOX modulator, e.g., a TOX2 modulator. In some embodiments, the TOX2 modulator results in increased level, expression, and/or activity of TOX2. In some embodiments, the TOX2 modulator is selected from the group consisting of: an antibody molecule (e.g., an agonist antibody that binds a TOX2 modulator, or an antibody molecule that binds a TOX2 inhibitor); a low molecular weight compound, or a molecule targeting a direct or an indirect inhibitor of TOX2, e.g., a RNAi agent, a CRISPR, a TALEN, or a zinc finger nuclease targeting an inhibitor of TOX2.

[0025] In some embodiments, the TOX^{hi} CAR cell population comprises at least about 10%, 20%, 30%, 40%, 50%, 60%, 70%, 80%, 90%, 95%, to about 100% TOX^{hi} CAR cell. In some embodiments, the immune effector cell population comprises at least about 10-100%, 20-100%, 30-100%, 40-100%, 50-100%, 60-100%, 70-100%, 80-100%, 90-100%, 10-90%, 10-80%, 10-70%, 10-60%, 10-50%, 10-40%, 10-30%, or 10-20% TOX^{hi} CAR cell.

[0026] In some embodiments, provided herein is a method of making, e.g., manufacturing, a modified immune effector cell (e.g., a population of immune effector cells comprising modified immune effector cells), said method comprising:
[0027] i) providing an immune effector cell (e.g., a population of immune effector cells, e.g., T cells or NK cells);
[0028] ii) genetically engineering the immune effector cell or the population of immune effector cells of i) to express a chimeric antigen receptor (CAR) comprising an antigen-binding domain, a transmembrane domain, and an intracellular signaling domain;
[0029] iii) treating, e.g., contacting, and/or genetically engineering the immune effector cell or population of immune effector cells of i), or the immune effector cell or population of immune effector cells of ii), to have an increased level, expression, and/or activity of a TOX family protein, wherein the level, expression, and/or activity of the TOX family protein is increased compared to a control cell,
[0030] iv) maintaining the population of immune effector cells under conditions that allow expression of the CAR polypeptide, and increased expression, level, and/or activity of the TOX family protein,

[0031] thereby making the TOX^{hi} CAR-expressing immune effector cell.

[0032] In some embodiments, the CAR comprises an antigen-binding domain, a transmembrane domain, and an intracellular signaling domain.

[0033] In some embodiments, step (ii) is performed before step (iii).

[0034] In some embodiments, step (ii) is performed after step (iii).

[0035] In some embodiments, step (ii) and step (iii) are performed concurrently.

[0036] In some embodiments, the TOX family protein is chosen from a TOX molecule, TOX2 protein, TOX3 protein or TOX4 protein, e.g., a human TOX protein, TOX2 protein, TOX3 protein or TOX4 protein.

[0037] In some embodiments, the TOX family protein is a TOX2 protein, e.g., as described herein.

[0038] In some embodiments, the TOX2 modulator results in increased level, expression, and/or activity of TOX2. In some embodiments, the TOX2 modulator is selected from the group consisting of: an antibody molecule (e.g., an agonist antibody that binds a TOX2 modulator, or an antibody molecule that binds a TOX2 inhibitor); a low molecular weight compound, or a molecule targeting a direct or an indirect inhibitor of TOX2, e.g., a RNAi agent, a CRISPR, a TALEN, or a zinc finger nuclease targeting an inhibitor of TOX2, e.g., Tet2.

[0039] In some embodiments, the disclosure provides, a method of increasing the therapeutic efficacy of a CAR-expressing cell, e.g., a population of CAR-expressing cells, comprising:
[0040] a) providing a population of CAR-expressing immune effector cells, e.g., CAR-expressing T cells or NK cells;
[0041] b) treating, e.g., contacting, and/or genetically engineering the population of immune effector cells of (a) to have an increased level, expression, and/or activity of a TOX family protein, wherein the level, expression, and/or activity of the TOX family protein is increased compared to a control cell; and
[0042] c) maintaining the population of immune effector cells under conditions that allow expression of the CAR polypeptide, and increased level, expression, and/or activity of the TOX family protein,

[0043] thereby increasing the therapeutic efficacy of the CAR-expressing immune effector cell.

[0044] In some embodiments, the method results in a TOX^{hi} CAR cell having an increased level, expression, and/or activity of a TOX-family protein, compared to a control cell, e.g., as described herein.

[0045] In some embodiments, the TOX family protein is chosen from a TOX molecule, TOX2 protein, TOX3 protein or TOX4 protein, e.g., a human TOX protein, TOX2 protein, TOX3 protein or TOX4 protein.

[0046] In some embodiments, the TOX family protein is a TOX2 protein, e.g., as described herein.

[0047] In some embodiments, the TOX2 modulator results in increased level, expression, and/or activity of TOX2. In some embodiments, the TOX2 modulator is selected from the group consisting of: an antibody molecule (e.g., an agonist antibody that binds a TOX2 modulator, or an antibody molecule that binds a TOX2 inhibitor); a low molecular weight compound, or a molecule targeting a direct or an indirect inhibitor of TOX2, e.g., a RNAi agent, a CRISPR, a TALEN, or a zinc finger nuclease targeting an inhibitor of TOX2.

[0048] In some embodiments, provided herein is a method of making, e.g., manufacturing, a population of Chimeric Antigen Receptor (CAR)-expressing immune effector cells, comprising contacting said population of CAR-expressing immune effector cells ex vivo with a TOX2 protein or TOX2 modulator, wherein the CAR comprises an antigen-binding domain, a transmembrane domain, and an intracellular signaling domain.

[0049] In some embodiments of any of the compositions or methods disclosed herein, a TOX2 protein comprises a recombinant nucleic acid molecule encoding TOX2, e.g., a TOX2 nucleic acid molecule encoding an amino acid sequence having at least 85%, 90%, 91%, 92%, 93%, 94%, 95%, 96%, 97%, 98%, or 99% identity to SEQ ID NO: 2000, SEQ ID NO: 2001, SEQ ID NO: 2002, or SEQ ID NO: 2003, or a functional fragment thereof. In some embodiments, the TOX2 protein comprises a recombinant nucleic acid molecule encoding TOX2 having the nucleic acid sequence of SEQ ID NO: 2000, SEQ ID NO: 2001, SEQ ID NO: 2002, or SEQ ID NO: 2003.

[0050] In some embodiments, the TOX2 nucleic acid molecule comprises the sequence of SEQ ID NO: 2004, SEQ ID NO: 2005, SEQ ID NO: 2006 or SEQ ID NO: 2007, or a sequence having at least 85%, 90%, 91%, 92%, 93%, 94%, 95%, 96%, 97%, 98%, or 99% identity to SEQ ID NO: 2004, SEQ ID NO: 2005, SEQ ID NO: 2006 or SEQ ID NO: 2007.

[0051] In some embodiments, the TOX2 nucleic acid molecule is expressed in the immune effector cell.

[0052] In some embodiments of any of the compositions or methods disclosed herein, the TOX2 protein comprises an amino acid molecule having at least 85%, 90%, 91%, 92%, 93%, 94%, 95%, 96%, 97%, 98%, or 99% identity to SEQ ID NO: 2000, SEQ ID NO: 2001, SEQ ID NO: 2002, or SEQ ID NO: 2003, or a functional fragment thereof. In some embodiments, the TOX2 protein comprises an amino acid having the sequence of SEQ ID NO: 2000, SEQ ID NO: 2001, SEQ ID NO: 2002, or SEQ ID NO: 2003.

[0053] In some embodiments, the TOX2 modulator targets a regulator, e.g., an upstream regulator, of TOX2, optionally, wherein the TOX2 modulator is chosen from:

[0054] (i) a molecule that increases the transcription of TOX2 mRNA (e.g., a molecule that increases chromatin accessibility of the TOX2 promoter or a regulatory element thereof);

[0055] (ii) a molecule that increases the translation of TOX2 protein;

[0056] (iii) a molecule that increases the stability of TOX2, e.g., TOX2 mRNA or TOX2 protein;

[0057] (iv) a molecule that increases the activity of TOX2 protein, e.g., a DNA binding of the TOX2 protein; or

[0058] (v) a molecule that increases the amount, level and/or expression of TOX2, e.g., TOX2 mRNA or TOX2 protein, e.g., an inhibitor of an inhibitor of TOX2 (e.g., an inhibitor of a Tet family member (e.g., an inhibitor of a Tet2 protein)).

[0059] In some embodiments, the TOX2 modulator is selected from the group consisting of: an antibody molecule (e.g., an agonist antibody that binds a TOX2 modulator, or an antibody molecule that binds a TOX2 inhibitor); a low molecular weight compound, or a molecule targeting a direct or an indirect inhibitor of TOX2, e.g., a RNAi agent, a CRISPR, a TALEN, or a zinc finger nuclease targeting an inhibitor of TOX2, e.g., Tet2.

[0060] In some embodiments, the TOX2 modulator is an antibody molecule (e.g., an agonist antibody that binds a TOX2 modulator, or an antibody molecule that binds a TOX2 inhibitor).

[0061] In some embodiments, the TOX2 modulator is a low molecular weight compound.

[0062] In some embodiments, the TOX2 modulator is a molecule targeting a direct or an indirect inhibitor of TOX2, e.g., a RNAi agent, a CRISPR, a TALEN, or a zinc finger nuclease targeting an inhibitor of TOX2, e.g., Tet2.

[0063] In some embodiments of any of the compositions or methods disclosed herein, the increased level, expression, and/or activity of a TOX family protein, e.g., TOX2, is measured by evaluating the transcription level of TOX2 mRNA, e.g., as detected using quantitative RT-PCR.

[0064] In some embodiments of any of the compositions or methods disclosed herein, the increased level, expression, and/or activity of a TOX family protein, e.g., TOX2, is measured by evaluating the protein level of TOX2, e.g., as detected using an immunoassay.

[0065] In some embodiments of any of the compositions or methods disclosed herein, the increased level, expression, and/or activity of a TOX family protein, e.g., TOX2, is measured by evaluating the activity of TOX2, e.g., a DNA binding activity of TOX2, e.g., as detected using chromatin IP (ChIP).

[0066] In some embodiments of any of the compositions or methods disclosed herein, the increased level, expression, and/or activity of a TOX family protein, e.g., TOX2, is measured by evaluating a target of TOX2 (e.g., a downstream target of TOX2, e.g., T-bet), or a pathway modulated, e.g., activated, by TOX2, e.g., as detected using quantitative RT-PCR.

[0067] In some embodiments of any of the compositions or methods disclosed herein, the immune effector cell is contacted with the TOX2 protein or the TOX2 modulator in vivo, in vitro, or ex vivo.

[0068] In some embodiments of any of the compositions or methods disclosed herein, wherein the control cell not engineered to express a TOX2 protein, or is not contacted with a TOX2 modulator.

[0069] In some embodiments of any of the compositions or methods disclosed herein, wherein the modified immune effector cell and the control cell are from the same subject.

[0070] In some embodiments of any of the compositions or methods disclosed herein, the modified immune effector cell and the control cell are from different subjects.

[0071] In some embodiments of any of the compositions or methods disclosed herein, the immune effector cell population is enriched for TOX^{hi} CAR cells, e.g., at least about 50%, 60%, 70%, 80%, 85%, 90%, 91%, 92%, 93%, 94%, 95%, 96%, 97%, 98%, 99% or 100% of the cells are TOX^{hi} CAR cell, e.g., at least about 50%, 60%, 70%, 80%, 85%, 90%, 91%, 92%, 93%, 94%, 95%, 96%, 97%, 98%, 99% or 100% of the cells have increased level, expression, and/or activity of TOX2.

[0072] In some embodiments any of the compositions or methods disclosed herein, comprises a first population of TOX^{hi} CAR cells and a second population of CAR-expressing immune effector cells, e.g., wherein the second population does not comprise TOX^{hi} CAR cell, e.g., the second population comprises cells that do not have increased level, expression, and/or activity of TOX2, e.g., the second population comprises cells that have a lower level, expression, and/or activity of TOX2 compared with the first population of TOX^{hi} CAR cell.

[0073] In some embodiments, the second population of immune effector cells comprises CAR-expressing immune effector cells.

[0074] In some embodiments, the first population of TOX^{hi} CAR cells and the second population of CAR-expressing immune effector cells comprise a CAR having the same antigen binding domain.

[0075] In some embodiments any of the compositions or methods disclosed herein, further comprises a third population of immune effector cells, e.g., wherein the third population of cells does not express the CAR polypeptide and has increased level, expression, and/or activity of TOX2.

[0076] In some embodiments any of the compositions or methods disclosed herein, comprises a a first population of TOX^{hi} CAR cells and an additional population of immune effector cells, e.g., wherein the additional population of cells does not express the CAR polypeptide, and has increased level, expression, and/or activity of TOX2.

[0077] In some embodiments of any of the compositions or methods disclosed herein, the TOX^{hi} CAR cell population has any one, two, three, four, five, or all of the following properties:
[0078] i. improved immune effector cell function, e.g., improved T cell or NK cell function;
[0079] ii. an increased level, expression, and/or activity of CAR-expressing cells having a central memory T cell phenotype, e.g., as described herein;
[0080] iii. increased proliferation, e.g., expansion, of CAR-expressing cells;
[0081] iv. improved efficacy of CAR-expressing cells, e.g., improved target cell killing, cytokine secretion, amelioration of a symptom of a disease, or treatment of disease;
[0082] v. increased T-bet level, expression, and/or activity; and/or
[0083] vi. reduced PD-1 level, expression, and/or activity.

[0084] In some embodiments, any one, or all of (i)-(vi) is compared to a control cell, e.g., an immune effector cell having the following:
[0085] a. a CAR-expressing immune effector cell, which is not treated and/or is not genetically engineered to have an increased level, expression, and/or activity of a TOX family protein; or
[0086] b. a non-CAR expressing immune effector cell, which is not treated and/or is not genetically engineered to have an increased level, expression, and/or activity of a TOX family protein.

[0087] In some embodiments of any of the compositions or methods disclosed herein, the population of cells has an improved immune effector cell function, e.g., improved T cell or NK cell function, e.g., improved cytotoxic activity of T cells or NK cells, e.g., compared to the control cell.

[0088] In some embodiments of any of the compositions or methods disclosed herein, the population of cells has an increased level, expression, and/or activity of CAR-expressing cells having a central memory T cell phenotype, e.g., CD4+ or CD8+ central memory T cells that are CD45RO+ CCR7+. In some embodiments, the increase in level, expression, and/or activity of CAR-expressing cells having a central memory T cell phenotype is at least 10%, 20%, 30%, 40%, 50%, 60%, 70%, 80%, 90%, 95%, 100% or greater, e.g., as measured by an assay of Examples 1-4, compared to the control cell.

[0089] In some embodiments of any of the compositions or methods disclosed herein, the population of cells has increased proliferation, e.g., expansion, e.g., by at least 1.1, 1.2, 1.3, 1.4, 1.5, 2, 3, 4, 5, 6, 7, 8, 9, 10, 20, 30, 40, 50 fold or more, e.g., as measured by an assay of Examples 1-4, compared to the control cell.

[0090] In some embodiments of any of the compositions or methods disclosed herein, the population of cells has improved efficacy, e.g., improved target cell killing, cytokine secretion, amelioration of a symptom of a disease, or treatment of disease; e.g., as measured by an assay of Examples 1-4, compared to the control cell.

[0091] In some embodiments of any of the compositions or methods disclosed herein, the population of cells has increased T-bet level, expression, and/or activity, e.g., an increase of at least 10%, 20%, 30%, 40%, 50%, 60%, 70%, 80%, 90%, 95%, 100% or greater, e.g., as measured by an assay of Examples 1-4, compared to the control cell.

[0092] In some embodiments of any of the compositions or methods disclosed herein, the population of cells has reduced PD-1 level, expression, and/or activity, e.g., a reduction of at least 5%, 10%, 20%, 40%, 60%, 80%, 90%, 100%, 200%, 300%, 500% or more, e.g., as measured by an assay of Examples 1-4, compared to the control cell.

[0093] In some embodiments of any of the compositions or methods disclosed herein, the TOX^{hi} CAR cell population is cultured, e.g., expanded, e.g., for at least 1, 2, 3, 4, 5, 6, 7, 8, 9, 10, 11, 12, 13, 14, 15, 16, 17, 18, 19, 20, or 21 days or for 1-7, 7-14, or 14-21 days.

[0094] In some embodiments of any of the compositions or methods disclosed herein, the nucleic acid molecule encoding the CAR polypeptide, and the nucleic acid molecule encoding the TOX family protein, or TOX2 modulator, are disposed on a single nucleic acid molecule, e.g., a viral vector, e.g., a lentivirus vector. In some embodiments, the method further comprises a selection for, e.g., enriching for, TOX2 and/or CAR-expressing cells.

[0095] In some embodiments of any of the compositions or methods disclosed herein, the nucleic acid molecule encoding the CAR polypeptide and the nucleic acid molecule encoding the TOX family protein, or TOX2 modulator, are disposed on separate nucleic acid molecules e.g., separate viral vectors, e.g., separate lentivirus vectors.

[0096] In some embodiments of any of the method of making disclosed herein, the method further comprises contacting the population of cells with a ligand, e.g., with an extracellular ligand, that binds to the CAR molecule, thereby stimulating the population of cells. In some embodiments, the ligand comprises a cognate antigen molecule or an antibody molecule that binds to the CAR molecule. In some embodiments, the ligand, e.g., cognate antigen molecule, is immobilized, e.g., on a substrate, e.g., a bead or a cell, or is soluble. In some embodiments, the population of cells is contacted, e.g., stimulated, with the cognate antigen molecule at least 1 time, 2 times, 3 times, 4 times, 5 times, 6 times, 7 times or 8 times, e.g., 4 times, wherein each contact period, e.g., stimulation, lasts for about 1 week. In some embodiments, the method further comprises contacting the population of cells with an IL-21 molecule. In some embodiments, the IL-21 molecule is provided at an amount of at least 5, 10, 15, 20, 30, 40, 50 or 100 ug/ml, e.g., 10 ug/ml. In some embodiments, the IL-21 molecule promotes a naïve T cell phenotype, e.g., CD45RO− CCR7+.

[0097] In some embodiments, following contacting, e.g., stimulating, with the cognate antigen molecule, the population of cells is not contacted with an exogenous cytokine or cognate antigen molecule.

[0098] In some embodiments, the population of cells is maintained for at least 1, 2, 3, 4, 5, 6, 7, 8, 9, 10, 11, 12, 13, 14, 15 or 20 weeks, e.g., 10 weeks.

[0099] In some embodiments, any of the methods disclosed herein results in an increase in the population of cells expressing CD45RO−CCR7+, e.g., by about at least 10%, 20%, 30%, 40%, 50%, 60%, 70%, 80%, 90%, 95%, 100% or greater, compared to a population of immune effector cells contacted with a nucleic acid molecule encoding a CAR molecule without being contacted with a TOX2 protein or TOX2 modulator.

### Method of Treatment and Evaluating a Subject

[0100] In some embodiments, provided herein is a method of treating a subject in need thereof, comprising administering to the subject an effective amount of a population of immune effector cells, genetically engineered to express a Chimeric Antigen Receptor (CAR), said population of immune effector cells treated and/or genetically engineered to have an increased level, expression, and/or activity of a TOX family protein (“population of TOX^{hi} CAR cell”),

[0101] wherein the CAR comprises an antigen-binding domain, a transmembrane domain, and an intracellular signaling domain,

[0102] wherein the level, expression, and/or activity of the TOX family protein in said population of TOX^{hi} CAR cell is increased compared to a control cell, e.g., an immune effector cell having the following:
[0103] (i) a CAR-expressing immune effector cell, which is not treated and/or is not genetically engineered to have an increased level, expression, and/or activity of a TOX family protein; or
[0104] (ii) a non-CAR expressing immune effector cell, which is not treated and/or is not genetically engineered to have an increased level, expression, and/or activity of a TOX family protein.

[0105] In some embodiments, the disclosure provides population of immune effector cells expressing a Chimeric Antigen Receptor (CAR), for use in a method of treating a subject in need thereof, the method comprising administering to said subject an effective amount of a population of immune effector cells genetically engineered to express a CAR, said population of immune effector cells treated and/or genetically engineered to have an increased level, expression, and/or activity of a TOX family protein (“population of TOX^{hi} CAR cell”),

[0106] wherein the CAR comprises an antigen-binding domain, a transmembrane domain, and an intracellular signaling domain,

[0107] wherein the level, expression, and/or activity of the TOX family protein in said population of TOX^{hi} CAR cell is increased compared to a control cell, e.g., an immune effector cell having the following:
[0108] (i) a CAR-expressing immune effector cell, which is not treated and/or is not genetically engineered to have an increased level, expression, and/or activity of a TOX family protein; or

[0109] a non-CAR expressing immune effector cell, which is not treated and/or is not genetically engineered to have an increased level, expression, and/or activity of a TOX family protein.

[0110] In some embodiments, disclosed herein is a method of treating a subject in need thereof, comprising administering to the subject an effective amount of a population of Chimeric Antigen Receptor (CAR)-expressing immune effector cells, wherein the CAR comprises an antigen-binding domain, a transmembrane domain, and an intracellular signaling domain, the method comprising:

[0111] acquiring a measure of TOX2 status in the subject, e.g., a measure of the level, expression, and/or activity of TOX2,

[0112] responsive to an increased level, expression, and/or activity of TOX2,

[0113] administering a population of CAR-expressing immune cells to the subject.

[0114] In some embodiments, the disclosure provides a method of treating a subject in need thereof, comprising administering to the subject an effective amount of a population of immune effector cells genetically engineered to express a Chimeric Antigen Receptor (CAR), said population of immune effector cells treated and/or genetically engineered to have an increased level, expression, and/or activity of a TOX-family protein (“population of TOX^{hi} CAR cell”),

[0115] wherein the CAR comprises an antigen-binding domain, a transmembrane domain, and an intracellular signaling domain,

[0116] wherein the level, expression, and/or activity of the TOX family protein in said population of TOX^{hi} CAR cells is increased compared to a control cell, the method comprising:

[0117] acquiring a measure of TOX2 status in the subject, e.g., a measure of the level, expression, and/or activity of TOX2,

[0118] responsive to a decreased level, expression, and/or activity of TOX2,

[0119] administering a population of TOX^{hi} CAR cells to the subject.

[0120] In some embodiments, provided herein is a method of evaluating a subject in need thereof, or monitoring the effectiveness of a population of CAR-expressing cells in a subject, wherein the CAR comprises an antigen-binding domain, a transmembrane domain, and an intracellular signaling domain, the method comprising:

[0121] acquiring a measure of TOX2 status in the subject (e.g., in a sample from the subject), e.g., a measure of the level, expression, and/or activity of TOX2 in a sample from the subject, wherein an increase in the level, expression, and/or activity of TOX2 is indicative of the subject's increased responsiveness to the population of CAR-expressing cells, and a decrease in the level, expression, and/or activity of TOX2 is indicative of the subject's decreased responsiveness to the population of CAR-expressing cells.

[0122] In some embodiments, responsive to an increased level, expression, and/or activity of TOX2, the method comprises administering a population of CAR-expressing immune cells to the subject.

[0123] In some embodiments, responsive to a decreased level, expression, and/or activity of TOX2, the method comprises administering a population of CAR-expressing immune cells having increased level expression, and/or activity of a TOX family protein (“population of TOX^{hi} CAR cell”) to the subject, wherein the level, expression, and/or activity of the TOX family protein in said modified immune effector cell is increased compared to a population of control cells.

[0124] In some embodiments, provided herein is a method of treating a subject in need thereof, comprising administering to said subject an effective amount of a population of Chimeric Antigen Receptor (CAR)-expressing immune effector cells, and a TOX2 molecule (e.g., TOX2 protein) or TOX2 modulator, wherein the CAR comprises an antigen-binding domain, a transmembrane domain, and an intracellular signaling domain.

[0125] In some embodiments, the disclosure provides a population of Chimeric Antigen Receptor (CAR)-expressing immune effector cells for use in a method of treating a subject in need thereof, the method comprising administering to said subject an effective amount of the population of CAR-expressing cells and a TOX2 molecule (e.g., a TOX2 protein) or TOX2 modulator, wherein the CAR comprises an antigen-binding domain, a transmembrane domain, and an intracellular signaling domain

[0126] In yet some embodiments, disclosed herein is a method of treating a subject in need thereof, comprising administering to said subject an effective amount of the population of TOX^{hi} CAR cells described herein.

[0127] In some embodiments, the disclosure provides a population of TOX^{hi} CAR cells for use in a method of treating a subject in need thereof, the method comprising administering to said subject an effective amount of the population of cells described herein.

[0128] In some embodiments of a method, or composition for use disclosed herein, the TOX family protein is chosen from a TOX protein, TOX2 protein, TOX3 protein or TOX4 protein, e.g., a human TOX protein, TOX2 protein, TOX3 protein or TOX4 protein.

[0129] In some embodiments, the TOX family proteins is a TOX2 protein.

[0130] In some embodiments of a method, or composition for use disclosed herein, the population of TOX^{hi} CAR cells comprises at least about 10%, 20%, 30%, 40%, 50%, 60%, 70%, 80%, 90%, 95%, to about 100% TOX^{hi} CAR cell.

[0131] In some embodiments of a method, or composition for use disclosed herein, the population of TOX^{hi} CAR cells is enriched for TOX^{hi} CAR-expressing immune effector cell, e.g., at least about 50%, 60%, 70%, 80%, 85%, 90%, 91%, 92%, 93%, 94%, 95%, 96%, 97%, 98%, 99% or 100% of the cells are TOX^{hi} CAR cell, e.g., at least about 50%, 60%, 70%, 80%, 85%, 90%, 91%, 92%, 93%, 94%, 95%, 96%, 97%, 98%, 99% or 100% of the cells have increased level, expression, and/or activity of TOX2.

[0132] In some embodiments of a method, or composition for use disclosed herein, the population of TOX^{hi} CAR cells comprises a first population of TOX^{hi} CAR cells and a second population of CAR-expressing immune effector cells, e.g., wherein the second population does not comprise TOX^{hi} CAR cell, e.g., the second population comprises cells that do not have increased level, expression, and/or activity of TOX2, e.g., the second population comprises cells that have a lower level, expression, and/or activity of TOX2 compared with the first population of TOX^{hi} CAR cells. In some embodiments, the second population of immune effector cells comprises CAR-expressing immune effector cells. In some embodiments, the first population of TOX^{hi} CAR cells and the second population of CAR-expressing immune effector cells comprise a CAR having the same antigen binding domain.

[0133] In some embodiments of a method, or composition for use disclosed herein, the population of TOX^{hi} CAR cells comprises a third population of immune effector cells, e.g., wherein the third population of cells does not express the CAR polypeptide and has increased level, expression, and/or activity of TOX2.

[0134] In some embodiments of a method, or composition for use disclosed herein, the first population of cells (e.g., the population of TOX^{hi} CAR cell), is detectable, e.g., persists, in a sample from the subject, for at least 1 week, 1 month, 2 months, 3 months, 4 months, 6 months, 8 months, 10 months, 12 months, or 24 months after administration of the population of TOX^{hi} CAR cells to the subject.

[0135] In some embodiments of a method, or composition for use disclosed herein, the second population of cells (e.g., the population of CAR-expressing cells that does not have an increased level, expression, and/or activity of TOX2 compared to the first population), is detectable, e.g., persists, for at least 1 week, 1 month, 2 months, 3 months, 4 months, 6 months, 8 months, 10 months, 12 months, or 24 months after administration of the population of TOX^{hi} CAR cells to the subject.

[0136] In some embodiments of any of the compositions or methods disclosed herein, the third population of cells (e.g., the population of cells that does not express the CAR polypeptide and has increased level, expression, and/or activity of TOX2) is detectable, e.g., persists, for at least 1 week, 1 month, 2 months, 3 months, 4 months, 6 months, 8 months, 10 months, 12 months, or 24 months after administration of the population of TOX^{hi} CAR cells to the subject.

[0137] In some embodiments a method, or composition for use disclosed herein, further comprises administering an additional population of CAR-expressing cells, wherein the additional population of CAR-expressing cells does not have an increased level, expression, and/or activity of TOX2.

[0138] In some embodiments of a method, or composition for use disclosed herein, the population of TOX^{hi} CAR cells is autologous or allogeneic.

[0139] In some embodiments of a method, or composition for use disclosed herein, the subject has been previously administered, or is receiving a population of CAR-expressing cells, e.g., a population of CAR-expressing cells that does not have an increased level and/or activity of TOX2.

[0140] In some embodiments a method, or composition for use disclosed herein further comprises acquiring a measure of TOX2 status in the subject, e.g., a measure of the level, expression, and/or activity of TOX2.

[0141] In some embodiments, an increase in the level, expression, and/or activity of TOX2 in a sample from the subject is indicative of the subject's increased responsiveness to the population of CAR-expressing cell, e.g., the population of CAR-expressing cells that does not have an increased level, expression, and/or activity of TOX2, e.g., increased responsiveness compared to a reference level (e.g., a subject not having an increased level, expression, and/or activity of TOX2).

[0142] In some embodiments, a decrease in the level, expression, and/or activity of TOX2 in a sample from the subject is indicative of the subject's decreased responsiveness to the population of CAR-expressing cell, e.g., the population of CAR-expressing cell that does not have an increased level, expression, and/or activity of TOX2 e.g., decreased responsiveness compared to a reference value (e.g., a subject having an increased level, expression, and/or activity of TOX2).

[0143] In some embodiments of a method, or composition for use disclosed herein, the level, expression, and/or activity of TOX2 is compared to a control level, e.g., a reference level, wherein the control level is chosen from:

[0144] a TOX2 level, expression, and/or activity obtained from a healthy subject or a subject who has not been administered the population of CAR-expressing cells;

[0145] a TOX2 level, expression, and/or activity obtained from a population of immune effector cells from the subject which has not been modified, e.g., genetically engineered and/or treated, to express a CAR or TOX2; or

[0146] a TOX2 level, expression, and/or activity obtained from the subject prior to administration of the population of CAR-expressing cells.

[0147] In some embodiments of a method, or composition for use disclosed herein, the level, expression, and/or activity of TOX2 is measured in a sample from the subject prior to treating, e.g., contacting, or genetically engineering the CAR-expressing immune effector cells to have an increased expression, activity and/or level of a TOX family protein. In some embodiments, treating comprises contacting with a TOX family protein (e.g., a TOX2 protein) or TOX modulator, e.g., a TOX2 modulator. In some embodiments, genetically engineering comprises contacting with a TOX family protein, e.g., a TOX2 protein.

[0148] In some embodiments of a method, or composition for use disclosed herein, the status of TOX2 is evaluated 1 week, 1 month, 2 months, 3 months, 4 months or 6 months after administration of the CAR-expressing cell, e.g., the CAR-expressing cell that does not have an increased level and/or activity of TOX2.

[0149] In some embodiments of any of the compositions or methods disclosed herein, the measure of the level, expression, and/or activity of TOX2 is acquired in an apheresis sample from the subject, e.g., in a population of immune effector cells prior to treating and/or genetically engineering said population of immune effector cells to have an increased level, expression, and/or activity of a TOX family protein, e.g., prior to treating, e.g., contacting, with a TOX2 protein or TOX modulator (e.g., TOX2 modulator).

[0150] In some embodiments of any of the compositions or methods disclosed herein, the measure of the level, expression, and/or activity of TOX2 is acquired in a manufactured TOX^{hi} CAR-expressing cell product sample, e.g., in a population of immune effector cells treated and/or genetically engineered to have an increased level, expression, and/or activity of a TOX family protein, e.g., after contacting with a TOX2 protein or TOX activator.

[0151] In some embodiments of any of the compositions or methods disclosed herein, the subject has been previously administered, or is receiving, a population of CAR-expressing cells. In some embodiments, the previously administered population of CAR-expressing cells has a lower level, expression, and/or activity of TOX2 than the population of TOX^{hi} CAR cell.

[0152] In some embodiments of any of the compositions or methods disclosed herein, the status of TOX2 is evaluated 1 week, 1 month, 2 months, 3 months, 4 months or 6 months after administration of the CAR-expressing cell therapy.

[0153] In some embodiments of any of the compositions or methods disclosed herein, the level, expression, and/or activity of TOX2 is compared to a control level, e.g., a reference level, wherein the control level is chosen from:

[0154] a TOX2 level, expression, and/or activity obtained from a healthy subject or a subject who has not been administered the population of CAR-expressing cells;

[0155] a TOX2 level, expression, and/or activity obtained from a population of immune effector cells from the subject which has not been genetically engineered and/or treated to express a CAR or TOX2; or

[0156] a TOX2 level, expression, and/or activity obtained from the subject prior to administration of the population of CAR-expressing cells.

[0157] Additional features or embodiments of any of the compositions, methods of making, methods of treatment or evaluation, or compositions for use described herein include one or more of the following:

[0158] In some embodiments of any of the compositions, methods of making, methods of treatment or evaluation, or compositions for use disclosed herein, the control cell is a cell (e.g., an immune effector cell) that has not been treated and/or genetically engineered to have increased expression, level and/or activity of a TOX family protein, e.g., TOX2 protein.

[0159] In some embodiments, the control cell is not genetically engineered to express a TOX2 protein, or is not treated, e.g., contacted with a TOX2 modulator.

[0160] In some embodiments, the control cell is an allogeneic cell.

[0161] In some embodiments, the control cell is an autologous cell. In some embodiments, the control cell is an autologous immune effector cell, e.g., a T cell or NK cell. In some embodiments, the control cell is obtained from a sample from the subject, e.g., an apheresis sample or a manufactured CAR-expressing product sample. In some embodiments, the control cell has not been modified, e.g., has not been genetically engineered or has not been treated. In some embodiments, the control cell has been modified, e.g., has been genetically engineered and/or has been treated.

[0162] In some embodiments, the level, expression, and/or activity of TOX2 is compared to a control level, e.g., a reference level. In some embodiments, the control level is chosen from:

[0163] a TOX2 level, expression, and/or activity obtained from a healthy subject or a subject who has not been administered the population of CAR-expressing cells;

[0164] a TOX2 level, expression, and/or activity obtained from a population of immune effector cells from the subject which has not been genetically engineered and/or treated to express a CAR or TOX2; or

[0165] a TOX2 level, expression, and/or activity obtained from the subject prior to administration of the population of CAR-expressing cells.

[0166] In some embodiments, the population of TOX^{hi} CAR cells comprises a CAR comprising an antigen binding domain, a transmembrane domain and an intracellular signaling domain.

[0167] In some embodiments, the population of TOX^{hi} CAR cells comprises a CAR comprising an antigen binding domain which binds to a tumor antigen, e.g., as described herein. In some embodiments, the antigen is chosen from: CD19; CD123; CD22; CD30; CD171; CS-1; C-type lectin-like molecule-1, CD33; epidermal growth factor receptor variant III (EGFRvIII); ganglioside G2 (GD2); ganglioside GD3; TNF receptor family member; B-cell maturation antigen; Tn antigen ((Tn Ag) or (GalNAcα-Ser/Thr)); prostate-specific membrane antigen (PSMA); Receptor tyrosine kinase-like orphan receptor 1 (ROR1); Fms-Like Tyrosine Kinase 3 (FLT3); Tumor-associated glycoprotein 72 (TAG72); CD38; CD44v6; Carcinoembryonic antigen (CEA); Epithelial cell adhesion molecule (EPCAM); B7H3 (CD276); KIT (CD117); Interleukin-13 receptor subunit alpha-2; Mesothelin; Interleukin 11 receptor alpha (IL-11Ra); prostate stem cell antigen (PSCA); Protease Serine 21; vascular endothelial growth factor receptor 2 (VEGFR2); Lewis(Y) antigen; CD24; Platelet-derived growth factor receptor beta (PDGFR-beta); Stage-specific embryonic antigen-4 (SSEA-4); CD20; Folate receptor alpha; Receptor tyrosine-protein kinase ERBB2 (Her2/neu); Mucin 1, cell surface associated (MUC1); epidermal growth factor receptor (EGFR); neural cell adhesion molecule (NCAM); Prostase; prostatic acid phosphatase (PAP); elongation factor 2 mutated (ELF2M); Ephrin B2; fibroblast activation protein alpha (FAP); insulin-like growth factor 1 receptor (IGF-I receptor), carbonic anhydrase IX (CAIX); Proteasome (Prosome, Macropain) Subunit, Beta Type, 9 (LMP2); glycoprotein 100 (gp100); oncogene polypeptide consisting of breakpoint cluster region (BCR) and Abelson murine leukemia viral oncogene homolog 1 (Abl) (bcr-abl); tyrosinase; ephrin type-A receptor 2 (EphA2); Fucosyl GM1; sialyl Lewis adhesion molecule (sLe); ganglioside GM3; transglutaminase 5 (TGS5); high molecular weight-melanoma-associated antigen (HMWMAA); o-acetyl-GD2 ganglioside (OAcGD2); Folate receptor beta; tumor endothelial marker 1 (TEM1/CD248); tumor endothelial marker 7-related (TEM7R); claudin 6 (CLDN6); thyroid stimulating hormone receptor (TSHR); G protein-coupled receptor class C group 5, member D (GPRC5D); chromosome X open reading frame 61 (CXORF61); CD97; CD179a; anaplastic lymphoma kinase (ALK); Polysialic acid; placenta-specific 1 (PLAC1); hexasaccharide portion of globoH glycoceramide (GloboH); mammary gland differentiation antigen (NY-BR-1); uroplakin 2 (UPK2); Hepatitis A virus cellular receptor 1 (HAVCR1); adrenoceptor beta 3 (ADRB3); pannexin 3 (PANX3); G protein-coupled receptor 20 (GPR20); lymphocyte antigen 6 complex, locus K 9 (LY6K); Olfactory receptor 51E2 (OR51E2); TCR Gamma Alternate Reading Frame Protein (TARP); Wilms tumor protein (WT1); Cancer/testis antigen 1 (NY-ESO-1); Cancer/testis antigen 2 (LAGE-1a); Melanoma-associated antigen 1 (MAGE-A1); ETS translocation-variant gene 6, located on chromosome 12p (ETV6-AML); sperm protein 17 (SPA17); X Antigen Family, Member 1A (XAGE1); angiopoietin-binding cell surface receptor 2 (Tie 2); melanoma cancer testis antigen-1 (MAD-CT-1); melanoma cancer testis antigen-2 (MAD-CT-2); Fos-related antigen 1; tumor protein p53 (p53); p53 mutant; prostein; surviving; telomerase; prostate carcinoma tumor antigen-1, melanoma antigen recognized by T cells 1; Rat sarcoma (Ras) mutant; human Telomerase reverse transcriptase (hTERT); sarcoma translocation breakpoints; melanoma inhibitor of apoptosis (ML-IAP); ERG (transmembrane protease, serine 2 (TMPRSS2) ETS fusion gene); N-Acetyl glucosaminyl-transferase V (NA17); paired box protein Pax-3 (PAX3); Androgen receptor; Cyclin B1; v-myc avian myelocytomatosis viral oncogene neuroblastoma derived homolog (MYCN); Ras Homolog Family Member C (RhoC); Tyrosinase-related protein 2 (TRP-2); Cytochrome P450 1B1 (CYP1B1); CCCTC-Binding Factor (Zinc Finger Protein)-Like, Squamous Cell Carcinoma Antigen Recognized By T Cells 3 (SART3); Paired box protein Pax-5 (PAX5); proacrosin binding protein sp32 (OY-TES1); lymphocyte-specific protein tyrosine kinase (LCK); A kinase anchor protein 4 (AKAP-4); synovial sarcoma, X breakpoint 2 (SSX2); Receptor for Advanced Glycation Endproducts (RAGE-1); renal ubiquitous 1 (RU1); renal ubiquitous 2 (RU2); legumain; human papilloma virus E6 (HPV E6); human papilloma virus E7 (HPV E7); intestinal carboxyl esterase; heat shock protein 70-2 mutated (mut hsp70-2); CD79a; CD79b; CD72; Leukocyte-associated immunoglobulin-like receptor 1 (LAIR1); Fc fragment of IgA receptor (FCAR or CD89); Leukocyte immunoglobulin-like receptor subfamily A member 2 (LILRA2); CD300 molecule-like family member f (CD300LF); C-type lectin domain family 12 member A (CLEC12A); bone marrow stromal cell antigen 2 (BST2); EGF-like module-containing mucin-like hormone receptor-like 2 (EMR2); lymphocyte antigen 75 (LY75); Glypican-3 (GPC3); Fc receptor-like 5 (FCRL5); or immunoglobulin lambda-like polypeptide 1 (IGLL1).

[0168] In some embodiments, the antigen is selected from mesothelin, EGFRvIII, GD2, Tn antigen, sTn antigen, Tn-O-Glycopeptides, sTn-O-Glycopeptides, PSMA, CD97, TAG72, CD44v6, CEA, EPCAM, KIT, IL-13Ra2, leguman, GD3, CD171, IL-11Ra, PSCA, MAD-CT-1, MAD-CT-2, VEGFR2, LewisY, CD24, PDGFR-beta, SSEA-4, folate receptor alpha, ERBBs (e.g., ERBB2), Her2/neu, MUC1, EGFR, NCAM, Ephrin B2, CAIX, LMP2, sLe, HMWMAA, o-acetyl-GD2, folate receptor beta, TEM1/CD248, TEM7R, FAP, Legumain, HPV E6 or E7, ML-IAP, CLDN6, TSHR, GPRCSD, ALK, polysialic acid, Fos-related antigen, neutrophil elastase, TRP-2, CYP1B1, sperm protein 17, beta human chorionic gonadotropin, AFP, thyroglobulin, PLAC1, globoH, RAGE1, MN-CA IX, human telomerase reverse transcriptase, intestinal carboxyl esterase, mut hsp 70-2, NA-17, NY-BR-1, UPK2, HAVCR1, ADRB3, PANX3, NY-ESO-1, GPR20, Ly6k, OR51E2, TARP, or GFRa4.

[0169] In some embodiments, the antigen is chosen from CD19, CD22, BCMA, CD20, CD123, EGFRvIII, or mesothelin.

[0170] In some embodiments, the antigen comprises mesothelin.

[0171] In some embodiments, the antigen comprises CD19.

[0172] In some embodiments, the antigen comprises BCMA.

[0173] In some embodiments, the transmembrane domain of the CAR molecule comprises a transmembrane domain of a protein chosen from the alpha, beta or zeta chain of the T-cell receptor, CD28, CD3 epsilon, CD45, CD4, CD5, CD8, CD9, CD16, CD22, CD33, CD37, CD64, CD80, CD86, CD123, CD134, CD137 or CD154. In some embodiments, the transmembrane domain comprises a transmembrane domain of CD8. In some embodiments, the transmembrane domain comprises the amino acid sequence of SEQ ID NO: 1026 (or a sequence at least about 85%, 90%, 95%, 99% or more identical thereto, and/or having one, two, three or more substitutions, insertions or deletions, e.g., conserved substitutions).

[0174] In some embodiments, the antigen binding domain is connected to the transmembrane domain by a hinge region, wherein said hinge region comprises the amino acid sequence of SEQ ID NO: 1018 or SEQ ID NO: 1020, or a sequence with 95-99% identity thereto.

[0175] In some embodiments, the intracellular signaling domain of the CAR molecule comprises a primary signaling domain. In some embodiments, the primary signaling domain comprises a functional signaling domain derived from CD3 zeta, TCR zeta, FcR gamma, FcR beta, CD3 gamma, CD3 delta, CD3 epsilon, CD5, CD22, CD79a, CD79b, CD278 (ICOS), FcεRI, DAP10, DAP12, or CD66d. In some embodiments, the primary signaling domain comprises a functional signaling domain derived from CD3 zeta. In some embodiments, the primary signaling domain comprises the amino acid sequence of SEQ ID NO: 1034 or 1037 (or a sequence at least about 85%, 90%, 95%, 99% or more identical thereto, and/or having one, two, three or more substitutions, insertions or deletions, e.g., conserved substitutions).

[0176] In some embodiments, the intracellular signaling domain comprises: a primary signaling domain; a costimulatory domain; or a primary signaling domain and a costimulatory signaling domain.

[0177] In some embodiments, the intracellular signaling domain of the CAR molecule comprises a costimulatory domain. In some embodiments, the costimulatory domain comprises a functional signaling domain derived from a MHC class I molecule, TNF receptor protein, Immunoglobulin-like protein, cytokine receptor, integrin, signalling lymphocytic activation molecule (SLAM), activating NK cell receptor, BTLA, a Toll ligand receptor, OX40, CD2, CD7, CD27, CD28, CD30, CD40, CDS, ICAM-1, 4-1BB (CD137), B7-H3, ICOS (CD278), GITR, BAFFR, LIGHT, HVEM (LIGHTR), KIRDS2, SLAMF7, NKp80 (KLRF1), NKp44, NKp30, NKp46, CD19, CD4, CD8alpha, CD8beta, IL2R beta, IL2R gamma, IL7R alpha, ITGA4, VLA1, CD49a, ITGA4, IA4, CD49D, ITGA6, VLA-6, CD49f, ITGAD, CD11d, ITGAE, CD103, ITGAL, CD11a, LFA-1, ITGAM, CD11b, ITGAX, CD11c, ITGB1, CD29, ITGB2, CD18, ITGB7, NKG2D, NKG2C, TNFR2, TRANCE/RANKL, DNAM1 (CD226), SLAMF4 (CD244, 2B4), CD84, CD96 (Tactile), CEACAM1, CRTAM, Ly9 (CD229), CD160 (BY55), PSGL1, CD100 (SEMA4D), CD69, SLAMF6 (NTB-A, Ly108), SLAM (SLAMF1, CD150, IPO-3), BLAME (SLAMF8), SELPLG (CD162), LTBR, LAT, GADS, SLP-76, PAG/Cbp, CD19a, CD28-OX40, CD28-4-1BB, or a ligand that specifically binds with CD83. In some embodiments, the costimulatory domain comprises a functional signaling domain derived from 4-1BB. In some embodiments, the costimulatory domain comprises the amino acid sequence of SEQ ID NO: 1029 or SEQ ID NO: 1032 (or a sequence at least about 85%, 90%, 95%, 99% or more identical thereto, and/or having one, two, three or more substitutions, insertions or deletions, e.g., conserved substitutions).

[0178] In some embodiments, the intracellular domain comprises the sequence of SEQ ID NO: 1029 or SEQ ID NO: 1032, and the sequence of SEQ ID NO: 1034 or SEQ ID NO: 1037, wherein the sequences comprising the intracellular signaling domain are expressed in the same frame and as a single polypeptide chain.

[0179] In some embodiments, the polypeptide comprising the CAR molecule comprises, in an N- to C-terminal orientation, an antigen binding domain that binds to the antigen, a transmembrane domain, and an intracellular signaling domain, optionally wherein the antigen binding domain is connected to the transmembrane domain by a hinge domain.

[0180] In some embodiments, the polypeptide comprising the CAR molecule further comprises a leader sequence comprising the sequence of SEQ ID NO: 1015.

[0181] In some embodiments, the immune effector cell is a T cell. In some embodiments, the immune effector cell is a T cell, e.g., a CD4+ T cell, a CD8+ T cell, a CD3+ T cell, or a combination thereof.

[0182] In some embodiments, the immune effector cell is an NK cell.

[0183] In some embodiments, the immune effector cell is a human cell.

[0184] In some embodiments, the subject has a disease associated with expression of a tumor antigen, e.g., a proliferative disease, a precancerous condition, a cancer, and a non-cancer related indication associated with expression of the tumor antigen.

[0185] In some embodiments, the cancer is a hematologic cancer chosen from one or more of chronic lymphocytic leukemia (CLL), acute leukemias, acute lymphoid leukemia (ALL), B-cell acute lymphoid leukemia (B-ALL), T-cell acute lymphoid leukemia (T-ALL), chronic myelogenous leukemia (CML), B cell prolymphocytic leukemia, blastic plasmacytoid dendritic cell neoplasm, Burkitt's lymphoma, diffuse large B cell lymphoma, follicular lymphoma, hairy cell leukemia, small cell- or a large cell-follicular lymphoma, malignant lymphoproliferative conditions, MALT lymphoma, mantle cell lymphoma, marginal zone lymphoma, multiple myeloma, myelodysplasia and myelodysplastic syndrome, non-Hodgkin's lymphoma, Hodgkin's lymphoma, plasmablastic lymphoma, plasmacytoid dendritic cell neoplasm, Waldenstrom macroglobulinemia, or pre-leukemia.

[0186] In some embodiments, the cancer is selected from the group consisting of colon cancer, rectal cancer, renal-cell carcinoma, liver cancer, non-small cell carcinoma of the lung, cancer of the small intestine, cancer of the esophagus, melanoma, bone cancer, pancreatic cancer, skin cancer, cancer of the head or neck, cutaneous or intraocular malignant melanoma, uterine cancer, ovarian cancer, rectal cancer, cancer of the anal region, stomach cancer, testicular cancer, uterine cancer, carcinoma of the fallopian tubes, carcinoma of the endometrium, carcinoma of the cervix, carcinoma of the vagina, carcinoma of the vulva, Hodgkin's Disease, non-Hodgkin's lymphoma, cancer of the endocrine system, cancer of the thyroid gland, cancer of the parathyroid gland, cancer of the adrenal gland, sarcoma of soft tissue, cancer of the urethra, cancer of the penis, solid tumors of childhood, cancer of the bladder, cancer of the kidney or ureter, carcinoma of the renal pelvis, neoplasm of the central nervous system (CNS), primary CNS lymphoma, tumor angiogenesis, spinal axis tumor, brain stem glioma, pituitary adenoma, Kaposi's sarcoma, epidermoid cancer, squamous cell cancer, T-cell lymphoma, environmentally induced cancers, combinations of said cancers, and metastatic lesions of said cancers.

[0187] In some embodiments, disclosed herein is a vector, e.g., a lentiviral vector, comprising a comprising a nucleic acid molecule disclosed herein.

[0188] In some embodiments, the vector comprises a bicistronic vector or a multicistronic vector.

[0189] In some embodiments, the vector comprises the vector comprises: an internal ribosomal entry site (IRES); a self-cleaving peptide, e.g., a 2A peptide; a splice donor and a splice acceptor; and/or an N-terminal intein splicing region and a C-terminal intein splicing region.

[0190] In some embodiments, the vector comprises a sequence encoding a CAR polypeptide and/or a sequence encoding a TOX protein (e.g., a TOX2 protein) or a TOX modulator (e.g., a TOX2 modulator).

[0191] In some embodiments, the TOX2 modulator targets a regulator, e.g., an upstream regulator, of TOX2.

[0192] In some embodiments, the TOX2 protein comprises a recombinant nucleic acid molecule encoding TOX2, e.g., a nucleic acid molecule encoding an amino acid sequence having at least 85% identity to SEQ ID NO: 2000, SEQ ID NO: 2001, SEQ ID NO: 2002, or SEQ ID NO: 2003, or a functional fragment thereof.

[0193] In some embodiments, the sequence encoding the CAR polypeptide and the sequence encoding the TOX2 protein or the TOX2 modulator are disposed in a single vector, e.g., a viral vector, e.g., a lentiviral vector. In some embodiments, the sequence encoding the CAR and the sequence encoding the TOX2 protein or the TOX2 modulator separated by a sequence for an internal ribosomal entry site (IRES), or a self-cleaving peptide, e.g., a 2A peptide.

[0194] In some embodiments, the sequence encoding the CAR polypeptide and the sequence encoding the TOX2 protein or the TOX2 modulator are disposed in separate vectors, e.g., separate viral vectors, e.g., separate lentiviral vectors.

[0195] In some embodiments, the first nucleic acid sequence is disposed on a first nucleic acid molecule, e.g., a first vector, e.g., a first viral vector, e.g., a first lentivirus vector. In some embodiments, the second nucleic acid sequence is disposed on a second nucleic acid molecule, e.g., a second vector, e.g., a second viral vector, e.g., a second lentivirus vector.

[0196] In some embodiments, the first nucleic acid sequence and the second nucleic acid sequence are disposed on a first nucleic acid molecule, e.g., a first vector, e.g., a first viral vector, e.g., a first lentivirus vector.

[0197] In some embodiments, the first nucleic acid sequence and the third nucleic acid sequence are disposed on a first nucleic acid molecule, e.g., a first vector, e.g., a first viral vector, e.g., a first lentivirus vector. In some embodiments, the second nucleic acid sequence is disposed on a second nucleic acid molecule, e.g., a second vector, e.g., a second viral vector, e.g., a second lentivirus vector.

[0198] In some embodiments, the nucleic acid is DNA or RNA.

[0199] In some embodiments, disclosed herein is a pharmaceutical composition comprising a population of cells described herein, and a pharmaceutically acceptable excipient.

[0200] In some embodiments, the disclosure provides a population of TOX^{hi} CAR cells for use in the manufacture of a medicament for treating a disease, e.g., a disease described herein, e.g., a cancer.

[0201] In some embodiments, a cell described herein is administered systemically or locally.

[0202] In some embodiments, the subject has a tumor, e.g., a solid tumor and the cell, is administered through intratumoral administration.

[0203] In some embodiments, the method further comprises administering a third therapeutic agent, e.g., as described herein. In some embodiments, the third therapeutic agent is a checkpoint modulator. In some embodiments, the third therapeutic agent is an anti-PD-1 antibody molecule, an anti-PD-L1 antibody molecule, an anti-CTLA-4 antibody molecule, an anti-TIM-3 antibody molecule, or an anti-LAG-3 molecule.

[0204] Although methods and materials similar or equivalent to those described herein can be used in the practice or testing of the present invention, suitable methods and materials are described below. All publications, patent applications, patents, and other references (e.g., sequence database reference numbers) mentioned herein are incorporated by reference in their entirety. For example, all GenBank, Unigene, and Entrez sequences referred to herein, e.g., in any Table herein, are incorporated by reference. Unless otherwise specified, the sequence accession numbers specified herein, including in any Table herein, refer to the database entries current as of Mar. 21, 2019. When one gene or protein references a plurality of sequence accession numbers, all of the sequence variants are encompassed.

[0205] In addition, the materials, methods, and examples are illustrative only and not intended to be limiting. Headings, sub-headings or numbered or lettered elements, e.g., (a), (b), (i) etc., are presented merely for ease of reading. The use of headings or numbered or lettered elements in this document does not require the steps or elements be performed in alphabetical order or that the steps or elements are necessarily discrete from one another. Other features, objects, and advantages of the invention will be apparent from the description and drawings, and from the claims.

### BRIEF DESCRIPTION OF THE DRAWINGS

[0206] The patent or application file contains at least one drawing executed in color. Copies of this patent or patent application publication with color drawing(s) will be provided by the Office upon request and payment of the necessary fee.

[0207] FIG. 1 shows the effect of TET2 knockdown on TOX2. RNAseq and ATACseq data from healthy donor CAR T cells show an increase in TOX2 expression, and an increase in chromatin openness along the TOX2 locus in the Tet2 knockdown sample compared to the control.

[0208] FIGS. 2A-2C show the effects of manipulating TOX2 levels. FIG. 2A shows loss of CCR7+ CD45RO+ central memory-like T cells upon TOX2 knockdown. FIG. 2B shows a decrease in antigen-dependent proliferation in T cells in which TOX2 expression has been knocked-down. FIG. 2C shows an increase in CCR7+ CD45RO+ central memory-like T cells upon TOX2 overexpression.

### DESCRIPTION

### Definitions

[0209] Unless defined otherwise, all technical and scientific terms used herein have the same meaning as commonly understood by one of ordinary skill in the art to which the invention pertains.

[0210] The term “a” and “an” refers to one or to more than one (i.e., to at least one) of the grammatical object of the article. By way of example, “an element” means one element or more than one element.

[0211] The term “about” when referring to a measurable value such as an amount, a temporal duration, and the like, is meant to encompass variations of ±20% or in some instances ±10%, or in some instances ±5%, or in some instances ±1%, or in some instances ±0.1% from the specified value, as such variations are appropriate to perform the disclosed methods.

[0212] The term “TOX family” as used herein, refers to the family of genes, and the proteins encoded by said genes, of the high mobility group (HMG)-box family, which share almost identical HMG-box DNA-binding domains. The TOX family includes, for example, TOX,

[0213] TOX2, TOX 3 and TOX4.

[0214] The term “TOX2 molecule” refers to a full length naturally-occurring TOX2 (e.g., a mammalian TOX2, e.g., human TOX2, e.g., HGNC: 16095, Entrez Gene ID: 84969, Ensembl: ENSG00000124191, OMIM: 611163, or UniProtKB: Q96NM4), a functional fragment of TOX2, or a variant, e.g., an active variant, of TOX2 having at least 80%, 85%, 90%, 95%, 96%, 97%, 98%, 99% or 100% sequence identity to a naturally-occurring wild type polypeptide of TOX2 or a fragment thereof. In some embodiments, the variant is a derivative, e.g., a mutant, of a wild type polypeptide or nucleic acid encoding the same. In some embodiments, the TOX2 variant, e.g., active variant of TOX2, has at least 50%, 60%, 70%, 80%, 85%, 90%, 95%, 96%, 97%, 98%, 99% or 100% activity of the wild type TOX2 polypeptide or fragment thereof. In some embodiments, a TOX2 molecule results in increased T cell proliferation, or expansion of central memory T cells.

[0215] In some embodiments, a TOX2 polypeptide is a full length naturally-occurring TOX2 polypeptide (e.g., a mammalian TOX2 polypeptide, e.g., human TOX2 polypeptide), a functional fragment of TOX2 polypeptide, or a variant, e.g., an active variant, of TOX2 polypeptide having at least 80%, 85%, 90%, 95%, 96%, 97%, 98%, 99% or 100% sequence identity to a naturally-occurring wild type polypeptide of TOX2 or a fragment thereof. In some embodiments, the TOX2 variant polypeptide, e.g., active variant of TOX2 polypeptide, has at least 50%, 60%, 70%, 80%, 85%, 90%, 95%, 96%, 97%, 98%, 99% or 100% activity of the wild type TOX2 polypeptide or fragment thereof. In some embodiments, a TOX2 polypeptide results in increased T cell proliferation, or expansion of central memory T cells.

[0216] The term “TOX molecule” refers to a full length naturally-occurring TOX (e.g., a mammalian TOX, e.g., human TOX, e.g., HGNC: 18988, Entrez Gene: 9760, Ensembl: ENSG00000198846, OMIM: 606863, or UniProtKB: 094900), a functional fragment of TOX, or a variant, e.g., an active variant, of TOX having at least 80%, 85%, 90%, 95%, 96%, 97%, 98%, 99% or 100% sequence identity to a naturally-occurring wild type polypeptide of TOX or a fragment thereof. In some embodiments, the variant is a derivative, e.g., a mutant, of a wild type polypeptide or nucleic acid encoding the same. In some embodiments, the TOX variant, e.g., active variant of TOX, has at least 50%, 60%, 70%, 80%, 85%, 90%, 95%, 96%, 97%, 98%, 99% or 100% activity of the wild type TOX polypeptide or fragment thereof.

[0217] In some embodiments, a TOX polypeptide is a full length naturally-occurring TOX polypeptide (e.g., a mammalian TOX polypeptide, e.g., human TOX polypeptide), a functional fragment of TOX polypeptide, or a variant, e.g., an active variant, of TOX polypeptide having at least 80%, 85%, 90%, 95%, 96%, 97%, 98%, 99% or 100% sequence identity to a naturally-occurring wild type polypeptide of TOX or a fragment thereof. In some embodiments, the TOX variant polypeptide, e.g., active variant of TOX polypeptide, has at least 50%, 60%, 70%, 80%, 85%, 90%, 95%, 96%, 97%, 98%, 99% or 100% activity of the wild type TOX polypeptide or fragment thereof. In some embodiments, a TOX polypeptide results in increased T cell proliferation, or expansion of central memory T cells.

[0218] The term “TOX3 molecule” refers to a full length naturally-occurring TOX3 (e.g., a mammalian TOX3, e.g., human TOX3, e.g., HGNC: 11972, Entrez Gene: 27324, Ensembl: ENSG00000103460, OMIM: 611416, or UniProtKB: 015405), a functional fragment of TOX3, or a variant, e.g., an active variant, of TOX3 having at least 80%, 85%, 90%, 95%, 96%, 97%, 98%, 99% or 100% sequence identity to a naturally-occurring wild type polypeptide of TOX3 or fragment thereof. In some embodiments, the variant is a derivative, e.g., a mutant, of a wild type polypeptide or nucleic acid encoding the same. In some embodiments, the TOX3 variant, e.g., active variant of TOX3, has at least 50%, 60%, 70%, 80%, 85%, 90%, 95%, 96%, 97%, 98%, 99% or 100% activity of the wild type TOX3 polypeptide or fragment thereof.

[0219] In some embodiments, a TOX3 polypeptide is a full length naturally-occurring TOX3 polypeptide (e.g., a mammalian TOX3 polypeptide, e.g., human TOX3 polypeptide), a functional fragment of TOX3 polypeptide, or a variant, e.g., an active variant, of TOX3 polypeptide having at least 80%, 85%, 90%, 95%, 96%, 97%, 98%, 99% or 100% sequence identity to a naturally-occurring wild type polypeptide of TOX3 or a fragment thereof. In some embodiments, the TOX3 variant polypeptide, e.g., active variant of TOX3 polypeptide, has at least 50%, 60%, 70%, 80%, 85%, 90%, 95%, 96%, 97%, 98%, 99% or 100% activity of the wild type TOX3 polypeptide or fragment thereof. In some embodiments, a TOX3 polypeptide results in increased T cell proliferation, or expansion of central memory T cells.

[0220] The term “TOX4 molecule” refers to a full length naturally-occurring TOX4 (e.g., a mammalian TOX4, e.g., human TOX4, e.g., HGNC: 20161, Entrez Gene: 9878, Ensembl: ENSG00000092203, OMIM: 614032, or UniProtKB: 094842), a functional fragment of TOX4, or a variant, e.g., an active variant, of TOX4 having at least 80%, 85%, 90%, 95%, 96%, 97%, 98%, 99% or 100% sequence identity to a naturally-occurring wild type polypeptide of TOX4 or fragment thereof. In some embodiments, the variant is a derivative, e.g., a mutant, of a wild type polypeptide or nucleic acid encoding the same. In some embodiments, the TOX4 variant, e.g., active variant of TOX4, has at least 50%, 60%, 70%, 80%, 85%, 90%, 95%, 96%, 97%, 98%, 99% or 100% activity of the wild type TOX4 polypeptide or fragment thereof.

[0221] In some embodiments, a TOX4 polypeptide is a full length naturally-occurring TOX4 polypeptide (e.g., a mammalian TOX4 polypeptide, e.g., human TOX4 polypeptide), a functional fragment of TOX4 polypeptide, or a variant, e.g., an active variant, of TOX4 polypeptide having at least 80%, 85%, 90%, 95%, 96%, 97%, 98%, 99% or 100% sequence identity to a naturally-occurring wild type polypeptide of TOX4 or a fragment thereof. In some embodiments, the TOX4 variant polypeptide, e.g., active variant of TOX4 polypeptide, has at least 50%, 60%, 70%, 80%, 85%, 90%, 95%, 96%, 97%, 98%, 99% or 100% activity of the wild type TOX4 polypeptide or fragment thereof. In some embodiments, a TOX4 polypeptide results in increased T cell proliferation, or expansion of central memory T cells.

[0222] The term “TOX2 modulator” as used herein, refers to a molecule that regulates TOX2, or a molecule that targets a regulator of TOX2, e.g., an upstream regulator of TOX2. In some embodiments, a TOX2 modulator results in an increased level, expression, and/or activity of TOX2. In some embodiments, the increased level, expression, and/or activity of TOX2 is compared to an otherwise similar cell not contacted with a TOX2 modulator, or prior to contacting with a TOX2 modulator. In some embodiments, a TOX2 modulator is a molecule that increases the transcription of TOX2 mRNA (e.g., a molecule that increases chromatin accessibility of the TOX2 promoter or regulatory element). In some embodiments, a TOX2 modulator is a molecule that increases the translation of TOX2 protein. In some embodiments, a TOX2 modulator is a molecule that increases the stability of TOX2, e.g., TOX2 mRNA or protein. In some embodiments, a TOX2 modulator is a molecule that increases the activity of TOX2, e.g., a DNA binding activity of TOX2. In some embodiments, a TOX2 modulator is an antibody molecule that binds to the TOX2 protein or a TOX2 modulator. In some embodiments, a TOX2 modulator is an antibody molecule (e.g., an agonist antibody that binds a TOX2 modulator, or an antibody molecule that binds a TOX2 inhibitor). In some embodiments, a TOX2 modulator is a low molecular weight compound that increases the level, expression, and/or activity of TOX2. In some embodiments, a TOX2 modulator is a molecule targeting a direct or an indirect inhibitor of TOX2, e.g., a RNAi agent, a CRISPR, a TALEN, or a zinc finger nuclease, targeting an inhibitor of TOX2. An example of a TOX2 modulator that inhibits an inhibitor of TOX2 is a gene editing system, e.g., as described herein, that is targeted to a nucleic acid sequence within the gene that inhibits TOX2, or its regulatory elements, such that modification of the nucleic acid sequence at or near the gene editing system binding site(s) is modified to reduce or eliminate expression of the inhibitor of TOX2, thus increasing the level, expression, and/or activity of TOX2. Another example of a TOX2 modulator that inhibits an inhibitor of TOX2, is a nucleic acid molecule, e.g., RNA molecule, e.g., a short hairpin RNA (shRNA) or short interfering RNA (siRNA), capable of hybridizing with the mRNA of an inhibitor of TOX2, and causing a reduction or elimination of translation of the inhibitor of TOX2, thus increasing the level, expression, and/or activity of TOX2.

[0223] The term “Chimeric Antigen Receptor” or alternatively a “CAR” refers to a recombinant polypeptide construct comprising at least an extracellular antigen binding domain, a transmembrane domain and a cytoplasmic signaling domain (also referred to herein as “an intracellular signaling domain”) comprising a functional signaling domain derived from a stimulatory molecule as defined below. In some embodiments, the domains in the CAR polypeptide construct are in the same polypeptide chain, e.g., comprise a chimeric fusion protein. In some embodiments, the domains in the CAR polypeptide construct are not contiguous with each other, e.g., are in different polypeptide chains, e.g., as provided in an RCAR as described herein.

[0224] In some embodiments, the cytoplasmic signaling domain comprises a primary signaling domain (e.g., a primary signaling domain of CD3-zeta). In some embodiments, the cytoplasmic signaling domain further comprises one or more functional signaling domains derived from at least one costimulatory molecule as defined below. In some embodiments, the costimulatory molecule is chosen from 41BB (i.e., CD137), CD27, ICOS, and/or CD28. In some embodiments, the CAR comprises a chimeric fusion protein comprising an extracellular antigen recognition domain, a transmembrane domain and an intracellular signaling domain comprising a functional signaling domain derived from a stimulatory molecule. In some embodiments, the CAR comprises a chimeric fusion protein comprising an extracellular antigen recognition domain, a transmembrane domain and an intracellular signaling domain comprising a functional signaling domain derived from a co-stimulatory molecule and a functional signaling domain derived from a stimulatory molecule. In some embodiments, the CAR comprises a chimeric fusion protein comprising an extracellular antigen recognition domain, a transmembrane domain and an intracellular signaling domain comprising two functional signaling domains derived from one or more co-stimulatory molecule(s) and a functional signaling domain derived from a stimulatory molecule. In some embodiments, the CAR comprises a chimeric fusion protein comprising an extracellular antigen recognition domain, a transmembrane domain and an intracellular signaling domain comprising at least two functional signaling domains derived from one or more co-stimulatory molecule(s) and a functional signaling domain derived from a stimulatory molecule. In some embodiments the CAR comprises an optional leader sequence at the amino-terminus (N-ter) of the CAR fusion protein. In some embodiments, the CAR further comprises a leader sequence at the N-terminus of the extracellular antigen recognition domain, wherein the leader sequence is optionally cleaved from the antigen recognition domain (e.g., an scFv) during cellular processing and localization of the CAR to the cellular membrane.

[0225] A CAR that comprises an antigen binding domain (e.g., an scFv, a single domain antibody, or TCR (e.g., a TCR alpha binding domain or TCR beta binding domain)) that targets a specific tumor marker X, wherein X can be a tumor marker as described herein, is also referred to as XCAR. For example, a CAR that comprises an antigen binding domain that targets CD19 is referred to as CD19CAR. The CAR can be expressed in any cell, e.g., an immune effector cell as described herein (e.g., a T cell or an NK cell).

[0226] The term “signaling domain” refers to the functional portion of a protein which acts by transmitting information within the cell to regulate cellular activity via defined signaling pathways by generating second messengers or functioning as effectors by responding to such messengers.

[0227] The term “antibody,” as used herein, refers to a protein, or polypeptide sequence derived from an immunoglobulin molecule, which specifically binds with an antigen.

[0228] Antibodies can be polyclonal or monoclonal, multiple or single chain, or intact immunoglobulins, and may be derived from natural sources or from recombinant sources. Antibodies can be tetramers of immunoglobulin molecules.

[0229] The term “antibody fragment” refers to at least one portion of an intact antibody, or recombinant variants thereof, and refers to the antigen binding domain, e.g., an antigenic determining variable region of an intact antibody, that is sufficient to confer recognition and specific binding of the antibody fragment to a target, such as an antigen. Examples of antibody fragments include, but are not limited to, Fab, Fab′, F(ab′)2, and Fv fragments, scFv antibody fragments, linear antibodies, single domain antibodies such as sdAb (either VL or VH), camelid VHH domains, and multi-specific molecules formed from antibody fragments such as a bivalent fragment comprising two or more, e.g., two, Fab fragments linked by a disulfide brudge at the hinge region, or two or more, e.g., two isolated CDR or other epitope binding fragments of an antibody linked. An antibody fragment can also be incorporated into single domain antibodies, maxibodies, minibodies, nanobodies, intrabodies, diabodies, triabodies, tetrabodies, v-NAR and bis-scFv (see, e.g., Hollinger and Hudson, Nature Biotechnology 23:1126-1136, 2005). Antibody fragments can also be grafted into scaffolds based on polypeptides such as a fibronectin type III (Fn3) (see U.S. Pat. No. 6,703,199, which describes fibronectin polypeptide minibodies).

[0230] The term “scFv” refers to a fusion protein comprising at least one antibody fragment comprising a variable region of a light chain and at least one antibody fragment comprising a variable region of a heavy chain, wherein the light and heavy chain variable regions are contiguously linked via a short flexible polypeptide linker, and capable of being expressed as a single chain polypeptide, and wherein the scFv retains the specificity of the intact antibody from which it is derived. Unless specified, as used herein an scFv may have the VL and VH variable regions in either order, e.g., with respect to the N-terminal and C-terminal ends of the polypeptide, the scFv may comprise VL-linker-VH or may comprise VH-linker-VL.

[0231] The terms “complementarity determining region” or “CDR,” as used herein, refer to the sequences of amino acids within antibody variable regions which confer antigen specificity and binding affinity. For example, in general, there are three CDRs in each heavy chain variable region (e.g., HCDR1, HCDR2, and HCDR3) and three CDRs in each light chain variable region (LCDR1, LCDR2, and LCDR3). The precise amino acid sequence boundaries of a given CDR can be determined using any of a number of well-known schemes, including those described by Kabat et al. (1991), “Sequences of Proteins of Immunological Interest,” 5th Ed. Public Health Service, National Institutes of Health, Bethesda, Md. (“Kabat” numbering scheme), Al-Lazikani et al., (1997) JMB 273,927-948 (“Chothia” numbering scheme), or a combination thereof. Under the Kabat numbering scheme, in some embodiments, the CDR amino acid residues in the heavy chain variable domain (VH) are numbered 31-35 (HCDR1), 50-65 (HCDR2), and 95-102 (HCDR3); and the CDR amino acid residues in the light chain variable domain (VL) are numbered 24-34 (LCDR1), 50-56 (LCDR2), and 89-97 (LCDR3). Under the Chothia numbering scheme, in some embodiments, the CDR amino acids in the VH are numbered 26-32 (HCDR1), 52-56 (HCDR2), and 95-102 (HCDR3); and the CDR amino acid residues in the VL are numbered 26-32 (LCDR1), 50-52 (LCDR2), and 91-96 (LCDR3). In a combined Kabat and Chothia numbering scheme, in some embodiments, the CDRs correspond to the amino acid residues that are part of a Kabat CDR, a Chothia CDR, or both. For instance, in some embodiments, the CDRs correspond to amino acid residues 26-35 (HCDR1), 50-65 (HCDR2), and 95-102 (HCDR3) in a VH, e.g., a mammalian VH, e.g., a human VH; and amino acid residues 24-34 (LCDR1), 50-56 (LCDR2), and 89-97 (LCDR3) in a VL, e.g., a mammalian VL, e.g., a human VL.

[0232] The portion of the CAR composition of the invention comprising an antibody or antibody fragment thereof may exist in a variety of forms, for example, where the antigen binding domain is expressed as part of a polypeptide chain including, for example, a single domain antibody fragment (sdAb), a single chain antibody (scFv), or e.g., a humanized antibody (Harlow et al., 1999, In: Using Antibodies: A Laboratory Manual, Cold Spring Harbor Laboratory Press, NY; Harlow et al., 1989, In: Antibodies: A Laboratory Manual, Cold Spring Harbor, N.Y.; Houston et al., 1988, Proc. Natl. Acad. Sci. USA 85:5879-5883; Bird et al., 1988, Science 242:423-426). In some embodiments, the antigen binding domain of a CAR composition of the invention comprises an antibody fragment. In some embodiments, the CAR comprises an antibody fragment that comprises an scFv.

[0233] As used herein, the term “binding domain” or “antibody molecule” (also referred to herein as “anti-target binding domain”) refers to a protein, e.g., an immunoglobulin chain or fragment thereof, comprising at least one immunoglobulin variable domain sequence. The term “binding domain” or “antibody molecule” encompasses antibodies and antibody fragments. In some embodiments, an antibody molecule is a multispecific antibody molecule, e.g., it comprises a plurality of immunoglobulin variable domain sequences, wherein a first immunoglobulin variable domain sequence of the plurality has binding specificity for a first epitope and a second immunoglobulin variable domain sequence of the plurality has binding specificity for a second epitope. In some embodiments, a multispecific antibody molecule is a bispecific antibody molecule. A bispecific antibody has specificity for no more than two antigens. A bispecific antibody molecule is characterized by a first immunoglobulin variable domain sequence which has binding specificity for a first epitope and a second immunoglobulin variable domain sequence that has binding specificity for a second epitope. The term “antibody heavy chain,” refers to the larger of the two types of polypeptide chains present in antibody molecules in their naturally occurring conformations, and which normally determines the class to which the antibody belongs.

[0234] The term “antibody light chain,” refers to the smaller of the two types of polypeptide chains present in antibody molecules in their naturally occurring conformations. Kappa (κ) and lambda (λ) light chains refer to the two major antibody light chain isotypes.

[0235] The term “recombinant antibody” refers to an antibody which is generated using recombinant DNA technology, such as, for example, an antibody expressed by a bacteriophage or yeast expression system. The term should also be construed to mean an antibody which has been generated by the synthesis of a DNA molecule encoding the antibody and which DNA molecule expresses an antibody protein, or an amino acid sequence specifying the antibody, wherein the DNA or amino acid sequence has been obtained using recombinant DNA or amino acid sequence technology which is available and well known in the art.

[0236] The term “antigen” or “Ag” refers to a molecule that provokes an immune response. This immune response may involve either antibody production, or the activation of specific immunologically-competent cells, or both. The skilled artisan will understand that any macromolecule, including virtually all proteins or peptides, can serve as an antigen. Furthermore, antigens can be derived from recombinant or genomic DNA. A skilled artisan will understand that any DNA, which comprises a nucleotide sequences or a partial nucleotide sequence encoding a protein that elicits an immune response therefore encodes an “antigen” as that term is used herein. Furthermore, one skilled in the art will understand that an antigen need not be encoded solely by a full length nucleotide sequence of a gene. It is readily apparent that the present invention includes, but is not limited to, the use of partial nucleotide sequences of more than one gene and that these nucleotide sequences are arranged in various combinations to encode polypeptides that elicit the desired immune response. Moreover, a skilled artisan will understand that an antigen need not be encoded by a “gene” at all. It is readily apparent that an antigen can be generated synthesized or can be derived from a biological sample, or might be macromolecule besides a polypeptide. Such a biological sample can include, but is not limited to a tissue sample, a tumor sample, a cell or a fluid with other biological components.

[0237] The term “anti-tumor effect” refers to a biological effect which can be manifested by various means, including but not limited to, e.g., a decrease in tumor volume, a decrease in the number of tumor cells, a decrease in the number of metastases, an increase in life expectancy, decrease in tumor cell proliferation, decrease in tumor cell survival, or amelioration of various physiological symptoms associated with the cancerous condition. An “anti-tumor effect” can also be manifested by the ability of the peptides, polynucleotides, cells and antibodies of the invention in prevention of the occurrence of tumor in the first place.

[0238] The term “anti-cancer effect” refers to a biological effect which can be manifested by various means, including but not limited to, e.g., a decrease in tumor volume, a decrease in the number of cancer cells, a decrease in the number of metastases, an increase in life expectancy, decrease in cancer cell proliferation, decrease in cancer cell survival, or amelioration of various physiological symptoms associated with the cancerous condition. An “anti-cancer effect” can also be manifested by the ability of the peptides, polynucleotides, cells and antibodies in prevention of the occurrence of cancer in the first place. The term “anti-tumor effect” refers to a biological effect which can be manifested by various means, including but not limited to, e.g., a decrease in tumor volume, a decrease in the number of tumor cells, a decrease in tumor cell proliferation, or a decrease in tumor cell survival. The term “autologous” refers to any material derived from the same individual to whom it is later to be re-introduced into the individual.

[0239] The term “allogeneic” refers to any material derived from a different animal of the same species as the individual to whom the material is introduced. Two or more individuals are said to be allogeneic to one another when the genes at one or more loci are not identical. In some embodiments, allogeneic material from individuals of the same species may be sufficiently unlike genetically to interact antigenically.

[0240] The term “xenogeneic” refers to a graft derived from an animal of a different species.

[0241] The term “apheresis” as used herein refers to the art-recognized extracorporeal process by which the blood of a donor or patient is removed from the donor or patient and passed through an apparatus that separates out selected particular constituent(s) and returns the remainder to the circulation of the donor or patient, e.g., by retransfusion. Thus, in the context of “an apheresis sample” refers to a sample obtained using apheresis.

[0242] The term “combination” refers to either a fixed combination in one dosage unit form, or a combined administration where a compound of the present invention and a combination partner (e.g. another drug as explained below, also referred to as “therapeutic agent” or “co-agent”) may be administered independently at the same time or separately within time intervals, especially where these time intervals allow that the combination partners show a cooperative, e.g. synergistic effect. The single components may be packaged in a kit or separately. One or both of the components (e.g., powders or liquids) may be reconstituted or diluted to a desired dose prior to administration. The terms “co-administration” or “combined administration” or the like as utilized herein are meant to encompass administration of the selected combination partner to a single subject in need thereof (e.g. a patient), and are intended to include treatment regimens in which the agents are not necessarily administered by the same route of administration or at the same time. The term “pharmaceutical combination” as used herein means a product that results from the mixing or combining of more than one active ingredient and includes both fixed and non-fixed combinations of the active ingredients. The term “fixed combination” means that the active ingredients, e.g. a compound of the present invention and a combination partner, are both administered to a patient simultaneously in the form of a single entity or dosage. The term “non-fixed combination” means that the active ingredients, e.g. a compound of the present invention and a combination partner, are both administered to a patient as separate entities either simultaneously, concurrently or sequentially with no specific time limits, wherein such administration provides therapeutically effective levels of the two compounds in the body of the patient. The latter also applies to cocktail therapy, e.g. the administration of three or more active ingredients.

[0243] The term “cancer” refers to a disease characterized by the rapid and uncontrolled growth of aberrant cells. Cancer cells can spread locally or through the bloodstream and lymphatic system to other parts of the body. Examples of various cancers are described herein and include but are not limited to, breast cancer, prostate cancer, ovarian cancer, cervical cancer, skin cancer, pancreatic cancer, colorectal cancer, renal cancer, liver cancer, brain cancer, lymphoma, leukemia, lung cancer and the like. Preferred cancers treated by the methods described herein include multiple myeloma, Hodgkin's lymphoma or non-Hodgkin's lymphoma.

[0244] The terms “tumor” and “cancer” are used interchangeably herein, e.g., both terms encompass solid and liquid, e.g., diffuse or circulating, tumors. As used herein, the term “cancer” or “tumor” includes premalignant, as well as malignant cancers and tumors.

[0245] “Derived from” as that term is used herein, indicates a relationship between a first and a second molecule. It generally refers to structural similarity between the first molecule and a second molecule and does not connotate or include a process or source limitation on a first molecule that is derived from a second molecule. For example, in the case of an intracellular signaling domain that is derived from a CD3zeta molecule, the intracellular signaling domain retains sufficient CD3zeta structure such that is has the required function, namely, the ability to generate a signal under the appropriate conditions. It does not connotate or include a limitation to a particular process of producing the intracellular signaling domain, e.g., it does not mean that, to provide the intracellular signaling domain, one must start with a CD3zeta sequence and delete unwanted sequence, or impose mutations, to arrive at the intracellular signaling domain.

[0246] The phrase “disease associated with expression of an antigen, e.g., a tumor antigen” includes, but is not limited to, a disease associated with a cell which expresses the antigen (e.g., wild-type or mutant antigen) or condition associated with a cell which expresses the antigen (e.g., wild-type or mutant antigen) including, e.g., proliferative diseases such as a cancer or malignancy or a precancerous condition such as a myelodysplasia, a myelodysplastic syndrome or a preleukemia; or a noncancer related indication associated with a cell which expresses the antigen (e.g., wild-type or mutant antigen). For the avoidance of doubt, a disease associated with expression of the antigen may include a condition associated with a cell which does not presently express the antigen, e.g., because expression of the antigen has been downregulated, e.g., due to treatment with a molecule targeting the antigen, but which at one time expressed the antigen. In some embodiments, the disease associated with expression of an antigen, e.g., a tumor antigen is a cancer (e.g., a solid cancer or a hematological cancer), a viral infection (e.g., HIV, a fungal infection, e.g., C. neoformans), an autoimmune disease (e.g. rheumatoid arthritis, system lupus erythematosus (SLE or lupus), pemphigus vulgaris, and Sjogren's syndrome; inflammatory bowel disease, ulcerative colitis; transplant-related allospecific immunity disorders related to mucosal immunity; and unwanted immune responses towards biologics (e.g., Factor VIII) where humoral immunity is important).

[0247] The term “conservative sequence modifications” refers to amino acid modifications that do not significantly affect or alter the binding characteristics of the antibody or antibody fragment containing the amino acid sequence. Such conservative modifications include amino acid substitutions, additions and deletions. Modifications can be introduced into an antibody or antibody fragment of the invention by standard techniques known in the art, such as site-directed mutagenesis and PCR-mediated mutagenesis. Conservative substitutions are ones in which the amino acid residue is replaced with an amino acid residue having a similar side chain. Families of amino acid residues having similar side chains have been defined in the art. These families include amino acids with basic side chains (e.g., lysine, arginine, histidine), acidic side chains (e.g., aspartic acid, glutamic acid), uncharged polar side chains (e.g., glycine, asparagine, glutamine, serine, threonine, tyrosine, cysteine, tryptophan), nonpolar side chains (e.g., alanine, valine, leucine, isoleucine, proline, phenylalanine, methionine), beta-branched side chains (e.g., threonine, valine, isoleucine) and aromatic side chains (e.g., tyrosine, phenylalanine, tryptophan, histidine). Thus, one or more amino acid residues within a CAR of the invention can be replaced with other amino acid residues from the same side chain family and the altered CAR can be tested using the functional assays described herein.

[0248] The term “stimulation,” refers to a primary response induced by binding of a stimulatory molecule (e.g., a TCR/CD3 complex) with its cognate ligand thereby mediating a signal transduction event, such as, but not limited to, signal transduction via the TCR/CD3 complex. Stimulation can mediate altered expression of certain molecules, such as downregulation of TGF-β, and/or reorganization of cytoskeletal structures, and the like.

[0249] The term “stimulatory molecule,” refers to a molecule expressed by a T cell that provides the primary cytoplasmic signaling sequence(s) that regulate primary activation of the TCR complex in a stimulatory way for at least some aspect of the T cell signaling pathway. In some embodiments, the ITAM-containing domain within the CAR recapitulates the signaling of the primary TCR independently of endogenous TCR complexes. In some embodiments, the primary signal is initiated by, for instance, binding of a TCR/CD3 complex with an MHC molecule loaded with peptide, and which leads to mediation of a T cell response, including, but not limited to, proliferation, activation, differentiation, and the like. A primary cytoplasmic signaling sequence (also referred to as a “primary signaling domain”) that acts in a stimulatory manner may contain a signaling motif which is known as immunoreceptor tyrosine-based activation motif or ITAM. Examples of an ITAM containing primary cytoplasmic signaling sequence that is of particular use in the invention includes, but is not limited to, those derived from TCR zeta, FcR gamma, FcR beta, CD3 gamma, CD3 delta, CD3 epsilon, CD5, CD22, CD79a, CD79b, CD278 (also known as “ICOS”), FcεRI and CD66d, DAP10 and DAP12. In a specific CAR of the invention, the intracellular signaling domain in any one or more CARS of the invention comprises an intracellular signaling sequence, e.g., a primary signaling sequence of CD3-zeta. The term “antigen presenting cell” or “APC” refers to an immune system cell such as an accessory cell (e.g., a B-cell, a dendritic cell, and the like) that displays a foreign antigen complexed with major histocompatibility complexes (MHC's) on its surface. T-cells may recognize these complexes using their T-cell receptors (TCRs). APCs process antigens and present them to T-cells.

[0250] An “intracellular signaling domain,” as the term is used herein, refers to an intracellular portion of a molecule. In embodiments, the intracellular signal domain transduces the effector function signal and directs the cell to perform a specialized function. While the entire intracellular signaling domain can be employed, in many cases it is not necessary to use the entire chain. To the extent that a truncated portion of the intracellular signaling domain is used, such truncated portion may be used in place of the intact chain as long as it transduces the effector function signal. The term intracellular signaling domain is thus meant to include any truncated portion of the intracellular signaling domain sufficient to transduce the effector function signal.

[0251] The intracellular signaling domain generates a signal that promotes an immune effector function of the CAR containing cell, e.g., a CART cell. Examples of immune effector function, e.g., in a CART cell, include cytolytic activity and helper activity, including the secretion of cytokines.

[0252] In some embodiments, the intracellular signaling domain can comprise a primary intracellular signaling domain. Exemplary primary intracellular signaling domains include those derived from the molecules responsible for primary stimulation, or antigen dependent simulation. In some embodiments, the intracellular signaling domain can comprise a costimulatory intracellular domain. Exemplary costimulatory intracellular signaling domains include those derived from molecules responsible for costimulatory signals, or antigen independent stimulation. For example, in the case of a CART, a primary intracellular signaling domain can comprise a cytoplasmic sequence of a T cell receptor, and a costimulatory intracellular signaling domain can comprise cytoplasmic sequence from co-receptor or costimulatory molecule.

[0253] A primary intracellular signaling domain can comprise a signaling motif which is known as an immunoreceptor tyrosine-based activation motif or ITAM. Examples of ITAM containing primary cytoplasmic signaling sequences include, but are not limited to, those derived from CD3 zeta, FcR gamma, FcR beta, CD3 gamma, CD3 delta, CD3 epsilon, CD5, CD22, CD79a, CD79b, CD278 (also known as “ICOS”), FcεRI, CD66d, DAP10 and DAP12.

[0254] The term “zeta” or alternatively “zeta chain”, “CD3-zeta” or “TCR-zeta” refers to CD247. Swiss-Prot accession number P20963 provides exemplary human CD3 zeta amino acid sequences. A “zeta stimulatory domain” or alternatively a “CD3-zeta stimulatory domain” or a “TCR-zeta stimulatory domain” refers to a stimulatory domain of CD3-zeta or a variant thereof (e.g., a molecule having mutations, e.g., point mutations, fragments, insertions, or deletions). In some embodiments, the cytoplasmic domain of zeta comprises residues 52 through 164 of GenBank Acc. No. BAG36664.1 or a variant thereof (e.g., a molecule having mutations, e.g., point mutations, fragments, insertions, or deletions). In some embodiments, the “zeta stimulatory domain” or a “CD3-zeta stimulatory domain” is the sequence provided as SEQ ID NO: 1034 or 1037 or a variant thereof (e.g., a molecule having mutations, e.g., point mutations, fragments, insertions, or deletions).

[0255] The term “costimulatory molecule” refers to the cognate binding partner on a T cell that specifically binds with a costimulatory ligand, thereby mediating a costimulatory response by the T cell, such as, but not limited to, proliferation. Costimulatory molecules are cell surface molecules other than antigen receptors or their ligands that are required for an efficient immune response. Costimulatory molecules include, but are not limited to an MHC class I molecule, TNF receptor proteins, Immunoglobulin-like proteins, cytokine receptors, integrins, signaling lymphocytic activation molecules (SLAM proteins), activating NK cell receptors, BTLA, Toll ligand receptor, OX40, CD2, CD7, CD27, CD28, CD30, CD40, CDS, ICAM-1, LFA-1 (CD11a/CD18), 4-1BB (CD137), B7-H3, CDS, ICAM-1, ICOS (CD278), GITR, BAFFR, LIGHT, HVEM (LIGHTR), KIRDS2, SLAMF7, NKp80 (KLRF1), NKp44, NKp30, NKp46, CD19, CD4, CD8alpha, CD8beta, IL2R beta, IL2R gamma, IL7R alpha, ITGA4, VLA1, CD49a, ITGA4, IA4, CD49D, ITGA6, VLA-6, CD49f, ITGAD, CD11d, ITGAE, CD103, ITGAL, CD11a, LFA-1, ITGAM, CD11b, ITGAX, CD11c, ITGB1, CD29, ITGB2, CD18, LFA-1, ITGB7, NKG2D, NKG2C, TNFR2, TRANCE/RANKL, DNAM1 (CD226), SLAMF4 (CD244, 2B4), CD84, CD96 (Tactile), CEACAM1, CRTAM, Ly9 (CD229), CD160 (BY55), PSGL1, CD100 (SEMA4D), CD69, SLAMF6 (NTB-A, Ly108), SLAM (SLAMF1, CD150, IPO-3), BLAME (SLAMF8), SELPLG (CD162), LTBR, LAT, GADS, SLP-76, PAG/Cbp, CD19a, CD28-OX40, CD28-4-1BB, and a ligand that specifically binds with CD83.

[0256] A costimulatory intracellular signaling domain refers to the intracellular portion of a costimulatory molecule.

[0257] The intracellular signaling domain can comprise the entire intracellular portion, or the entire native intracellular signaling domain, of the molecule from which it is derived, or a functional fragment thereof.

[0258] The term “4-1BB” refers to CD137 or Tumor necrosis factor receptor superfamily member 9. Swiss-Prot accession number P20963 provides exemplary human 4-1BB amino acid sequences. A “4-1BB costimulatory domain” refers to a costimulatory domain of 4-1BB, or a variant thereof (e.g., a molecule having mutations, e.g., point mutations, fragments, insertions, or deletions). In some embodiments, the “4-1BB costimulatory domain” is the sequence provided as SEQ ID NO: 1029 or a variant thereof (e.g., a molecule having mutations, e.g., point mutations, fragments, insertions, or deletions).

[0259] “Immune effector cell,” as that term is used herein, refers to a cell that is involved in an immune response, e.g., in the promotion of an immune effector response. Examples of immune effector cells include T cells, e.g., alpha/beta T cells and gamma/delta T cells, B cells, natural killer (NK) cells, natural killer T (NKT) cells, mast cells, and myeloid-derived phagocytes.

[0260] “Immune effector function or immune effector response,” as that term is used herein, refers to function or response, e.g., of an immune effector cell, that enhances or promotes an immune attack of a target cell. E.g., an immune effector function or response refers a property of a T or NK cell that promotes killing or the inhibition of growth or proliferation, of a target cell. In the case of a T cell, primary stimulation and co-stimulation are examples of immune effector function or response.

[0261] The term “effector function” refers to a specialized function of a cell. Effector function of a T cell, for example, may be cytolytic activity or helper activity including the secretion of cytokines.

[0262] The term “encoding” refers to the inherent property of specific sequences of nucleotides in a polynucleotide, such as a gene, a cDNA, or an mRNA, to serve as templates for synthesis of other polymers and macromolecules in biological processes having either a defined sequence of nucleotides (e.g., rRNA, tRNA and mRNA) or a defined sequence of amino acids and the biological properties resulting therefrom. Thus, a gene, cDNA, or RNA, encodes a protein if transcription and translation of mRNA corresponding to that gene produces the protein in a cell or other biological system. Both the coding strand, the nucleotide sequence of which is identical to the mRNA sequence and is usually provided in sequence listings, and the non-coding strand, used as the template for transcription of a gene or cDNA, can be referred to as encoding the protein or other product of that gene or cDNA.

[0263] Unless otherwise specified, a “nucleotide sequence encoding an amino acid sequence” includes all nucleotide sequences that are degenerate versions of each other and that encode the same amino acid sequence. The phrase nucleotide sequence that encodes a protein or a RNA may also include introns to the extent that the nucleotide sequence encoding the protein may in some version contain an intron(s).

[0264] The term “effective amount” or “therapeutically effective amount” are used interchangeably herein, and refer to an amount of a compound, formulation, material, or composition, as described herein effective to achieve a particular biological result.

[0265] The term “endogenous” refers to any material from or produced inside an organism, cell, tissue or system.

[0266] The term “exogenous” refers to any material introduced from or produced outside an organism, cell, tissue or system.

[0267] The term “expression” refers to the transcription and/or translation of a particular nucleotide sequence. In some embodiments, expression comprises translation of an mRNA introduced into a cell.

[0268] The term “transfer vector” refers to a composition of matter which comprises an isolated nucleic acid and which can be used to deliver the isolated nucleic acid to the interior of a cell. Numerous vectors are known in the art including, but not limited to, linear polynucleotides, polynucleotides associated with ionic or amphiphilic compounds, plasmids, and viruses. Thus, the term “transfer vector” includes an autonomously replicating plasmid or a virus. The term should also be construed to further include non-plasmid and non-viral compounds which facilitate transfer of nucleic acid into cells, such as, for example, a polylysine compound, liposome, and the like. Examples of viral transfer vectors include, but are not limited to, adenoviral vectors, adeno-associated virus vectors, retroviral vectors, lentiviral vectors, and the like.

[0269] The term “expression vector” refers to a vector comprising a recombinant polynucleotide comprising expression control sequences operatively linked to a nucleotide sequence to be expressed. An expression vector comprises sufficient cis-acting elements for expression; other elements for expression can be supplied by the host cell or in an in vitro expression system. Expression vectors include all those known in the art, including cosmids, plasmids (e.g., naked or contained in liposomes) and viruses (e.g., lentiviruses, retroviruses, adenoviruses, and adeno-associated viruses) that incorporate the recombinant polynucleotide.

[0270] The term “lentivirus” refers to a genus of the Retroviridae family. Lentiviruses are unique among the retroviruses in being able to infect non-dividing cells; they can deliver a significant amount of genetic information into the DNA of the host cell, so they are one of the most efficient methods of a gene delivery vector. HIV, SIV, and FIV are all examples of lentiviruses.

[0271] The term “lentiviral vector” refers to a vector derived from at least a portion of a lentivirus genome, including especially a self-inactivating lentiviral vector as provided in Milone et al., Mol. Ther. 17(8): 1453-1464 (2009). Other examples of lentivirus vectors that may be used in the clinic, include but are not limited to, e.g., the LENTIVECTOR® gene delivery technology from Oxford BioMedica, the LENTIMAX™ vector system from Lentigen and the like. Nonclinical types of lentiviral vectors are also available and would be known to one skilled in the art.

[0272] The term “homologous” or “identity” refers to the subunit sequence identity between two polymeric molecules, e.g., between two nucleic acid molecules, such as, two DNA molecules or two RNA molecules, or between two polypeptide molecules. When a subunit position in both of the two molecules is occupied by the same monomeric subunit; e.g., if a position in each of two DNA molecules is occupied by adenine, then they are homologous or identical at that position. The homology between two sequences is a direct function of the number of matching or homologous positions; e.g., if half (e.g., five positions in a polymer ten subunits in length) of the positions in two sequences are homologous, the two sequences are 50% homologous; if 90% of the positions (e.g., 9 of 10), are matched or homologous, the two sequences are 90% homologous.

[0273] “Humanized” forms of non-human (e.g., murine) antibodies are chimeric immunoglobulins, immunoglobulin chains or fragments thereof (such as Fv, Fab, Fab′, F(ab′)2 or other antigen-binding subsequences of antibodies) which contain minimal sequence derived from non-human immunoglobulin. For the most part, humanized antibodies and antibody fragments thereof are human immunoglobulins (recipient antibody or antibody fragment) in which residues from a complementarity-determining region (CDR) of the recipient are replaced by residues from a CDR of a non-human species (donor antibody) such as mouse, rat or rabbit having the desired specificity, affinity, and capacity. In some instances, Fv framework region (FR) residues of the human immunoglobulin are replaced by corresponding non-human residues. Furthermore, a humanized antibody/antibody fragment can comprise residues which are found neither in the recipient antibody nor in the imported CDR or framework sequences. These modifications can further refine and optimize antibody or antibody fragment performance. In general, the humanized antibody or antibody fragment thereof will comprise substantially all of at least one, and typically two, variable domains, in which all or substantially all of the CDR regions correspond to those of a non-human immunoglobulin and all or a significant portion of the FR regions are those of a human immunoglobulin sequence. The humanized antibody or antibody fragment can also comprise at least a portion of an immunoglobulin constant region (Fc), typically that of a human immunoglobulin. For further details, see Jones et al., Nature, 321: 522-525, 1986; Reichmann et al., Nature, 332: 323-329, 1988; Presta, Curr. Op. Struct. Biol., 2: 593-596, 1992.

[0274] “Fully human” refers to an immunoglobulin, such as an antibody or antibody fragment, where the whole molecule is of human origin or consists of an amino acid sequence identical to a human form of the antibody or immunoglobulin.

[0275] The term “isolated” means altered or removed from the natural state. For example, a nucleic acid or a peptide naturally present in a living animal is not “isolated,” but the same nucleic acid or peptide partially or completely separated from the coexisting materials of its natural state is “isolated.” An isolated nucleic acid or protein can exist in substantially purified form, or can exist in a non-native environment such as, for example, a host cell.

[0276] In the context of the present invention, the following abbreviations for the commonly occurring nucleic acid bases are used. “A” refers to adenosine, “C” refers to cytosine, “G” refers to guanosine, “T” refers to thymidine, and “U” refers to uridine.

[0277] The term “operably linked” or “transcriptional control” refers to functional linkage between a regulatory sequence and a heterologous nucleic acid sequence resulting in expression of the latter. For example, a first nucleic acid sequence is operably linked with a second nucleic acid sequence when the first nucleic acid sequence is placed in a functional relationship with the second nucleic acid sequence. For instance, a promoter is operably linked to a coding sequence if the promoter affects the transcription or expression of the coding sequence. Operably linked DNA sequences can be contiguous with each other and, e.g., where necessary to join two protein coding regions, are in the same reading frame.

[0278] The term “parenteral” administration of an immunogenic composition includes, e.g., subcutaneous (s.c.), intravenous (i.v.), intramuscular (i.m.), or intrasternal injection, intratumoral, or infusion techniques.

[0279] The term “nucleic acid” or “polynucleotide” refers to deoxyribonucleic acids (DNA) or ribonucleic acids (RNA) and polymers thereof in either single- or double-stranded form. Unless specifically limited, the term encompasses nucleic acids containing known analogues of natural nucleotides that have similar binding properties as the reference nucleic acid and are metabolized in a manner similar to naturally occurring nucleotides. Unless otherwise indicated, a particular nucleic acid sequence also implicitly encompasses conservatively modified variants thereof (e.g., degenerate codon substitutions, e.g., conservative substitutions), alleles, orthologs, SNPs, and complementary sequences as well as the sequence explicitly indicated. Specifically, degenerate codon substitutions, e.g., conservative substitutions may be achieved by generating sequences in which the third position of one or more selected (or all) codons is substituted with mixed-base and/or deoxyinosine residues (Batzer et al., Nucleic Acid Res. 19:5081 (1991); Ohtsuka et al., J. Biol. Chem. 260:2605-2608 (1985); and Rossolini et al., Mol. Cell. Probes 8:91-98 (1994)).

[0280] The terms “peptide,” “polypeptide,” and “protein” are used interchangeably, and refer to a molecule comprised of amino acid residues covalently linked by peptide bonds. A protein or peptide must contain at least two amino acids, and no limitation is placed on the maximum number of amino acids that can comprise a protein's or peptide's sequence. Polypeptides include any peptide or protein comprising two or more amino acids joined to each other by peptide bonds. As used herein, the term refers to both short chains, which also commonly are referred to in the art as peptides, oligopeptides and oligomers, for example, and to longer chains, which generally are referred to in the art as proteins, of which there are many types. “Polypeptides” include, for example, biologically active fragments, substantially homologous polypeptides, oligopeptides, homodimers, heterodimers, variants of polypeptides, modified polypeptides, derivatives, analogs, fusion proteins, among others. A polypeptide includes a natural peptide, a recombinant peptide, or a combination thereof.

[0281] The term “promoter” refers to a DNA sequence recognized by the synthetic machinery of the cell, or introduced synthetic machinery, required to initiate the specific transcription of a polynucleotide sequence.

[0282] The term “promoter/regulatory sequence” refers to a nucleic acid sequence which is required for expression of a gene product operably linked to the promoter/regulatory sequence. In some instances, this sequence may be the core promoter sequence and in other instances, this sequence may also include an enhancer sequence and other regulatory elements which are required for expression of the gene product. The promoter/regulatory sequence may, for example, be one which expresses the gene product in a tissue specific manner.

[0283] The term “constitutive” promoter refers to a nucleotide sequence which, when operably linked with a polynucleotide which encodes or specifies a gene product, causes the gene product to be produced in a cell under most or all physiological conditions of the cell.

[0284] The term “inducible” promoter refers to a nucleotide sequence which, when operably linked with a polynucleotide which encodes or specifies a gene product, causes the gene product to be produced in a cell substantially only when an inducer which corresponds to the promoter is present in the cell.

[0285] The term “tissue-specific” promoter refers to a nucleotide sequence which, when operably linked with a polynucleotide encodes or specified by a gene, causes the gene product to be produced in a cell substantially only if the cell is a cell of the tissue type corresponding to the promoter.

[0286] The terms “cancer associated antigen” or “tumor antigen” interchangeably refers to a molecule (typically a protein, carbohydrate or lipid) that is expressed on the surface of a cancer cell, either entirely or as a fragment (e.g., MHC/peptide), and which is useful for the preferential targeting of a pharmacological agent to the cancer cell. In some embodiments, a tumor antigen is a marker expressed by both normal cells and cancer cells, e.g., a lineage marker, e.g., CD19 on B cells. In some embodiments, a tumor antigen is a cell surface molecule that is overexpressed in a cancer cell in comparison to a normal cell, for instance, 1-fold over expression, 2-fold overexpression, 3-fold overexpression or more in comparison to a normal cell. In some embodiments, a tumor antigen is a cell surface molecule that is inappropriately synthesized in the cancer cell, for instance, a molecule that contains deletions, additions or mutations in comparison to the molecule expressed on a normal cell. In some embodiments, a tumor antigen will be expressed exclusively on the cell surface of a cancer cell, entirely or as a fragment (e.g., MHC/peptide), and not synthesized or expressed on the surface of a normal cell. In some embodiments, the CARs of the present invention include CARs comprising an antigen binding domain (e.g., antibody or antibody fragment) that binds to a MHC presented peptide. Normally, peptides derived from endogenous proteins fill the pockets of Major histocompatibility complex (MHC) class I molecules, and are recognized by T cell receptors (TCRs) on CD8+ T lymphocytes. The MHC class I complexes are constitutively expressed by all nucleated cells. In cancer, virus-specific and/or tumor-specific peptide/MHC complexes represent a unique class of cell surface targets for immunotherapy. TCR-like antibodies targeting peptides derived from viral or tumor antigens in the context of human leukocyte antigen (HLA)-A1 or HLA-A2 have been described (see, e.g., Sastry et al., J Virol. 2011 85(5):1935-1942; Sergeeva et al., Blood, 2011 117(16):4262-4272; Verma et al., J Immunol 2010 184(4):2156-2165; Willemsen et al., Gene Ther 2001 8(21):1601-1608; Dao et al., Sci Transl Med 2013 5(176):176ra33; Tassev et al., Cancer Gene Ther 2012 19(2):84-100). For example, TCR-like antibody can be identified from screening a library, such as a human scFv phage displayed library.

[0287] The term “tumor-supporting antigen” or “cancer-supporting antigen” interchangeably refer to a molecule (typically a protein, carbohydrate or lipid) that is expressed on the surface of a cell that is, itself, not cancerous, but supports the cancer cells, e.g., by promoting their growth or survival e.g., resistance to immune cells. Exemplary cells of this type include stromal cells and myeloid-derived suppressor cells (MDSCs). The tumor-supporting antigen itself need not play a role in supporting the tumor cells so long as the antigen is present on a cell that supports cancer cells.

[0288] The term “flexible polypeptide linker” or “linker” as used in the context of an scFv refers to a peptide linker that consists of amino acids such as glycine and/or serine residues used alone or in combination, to link variable heavy and variable light chain regions together. In some embodiments, the flexible polypeptide linker is a Gly/Ser linker and comprises the amino acid sequence (Gly-Gly-Gly-Ser)n, where n is a positive integer equal to or greater than 1. For example, n=1, n=2, n=3. n=4, n=5 and n=6, n=7, n=8, n=9 and n=10 (SEQ ID NO: 1009). In some embodiments, the flexible polypeptide linkers include, but are not limited to, (Gly4 Ser)4 (SEQ ID NO: 1010) or (Gly4 Ser)3 (SEQ ID NO: 1011). In some embodiments, the linkers include multiple repeats of (Gly2Ser), (GlySer) or (Gly3Ser) (SEQ ID NO: 1012). Also included within the scope of the invention are linkers described in WO2012/138475, incorporated herein by reference.

[0289] As used herein, a 5′ cap (also termed an RNA cap, an RNA 7-methylguanosine cap or an RNA m7G cap) is a modified guanine nucleotide that has been added to the “front” or 5′ end of a eukaryotic messenger RNA shortly after the start of transcription. The 5′ cap consists of a terminal group which is linked to the first transcribed nucleotide. Its presence is critical for recognition by the ribosome and protection from RNases. Cap addition is coupled to transcription, and occurs co-transcriptionally, such that each influences the other. Shortly after the start of transcription, the 5′ end of the mRNA being synthesized is bound by a cap-synthesizing complex associated with RNA polymerase. This enzymatic complex catalyzes the chemical reactions that are required for mRNA capping. Synthesis proceeds as a multi-step biochemical reaction. The capping moiety can be modified to modulate functionality of mRNA such as its stability or efficiency of translation.

[0290] As used herein, “in vitro transcribed RNA” refers to RNA, preferably mRNA, that has been synthesized in vitro. Generally, the in vitro transcribed RNA is generated from an in vitro transcription vector. The in vitro transcription vector comprises a template that is used to generate the in vitro transcribed RNA.

[0291] As used herein, a “poly(A)” is a series of adenosines attached by polyadenylation to the mRNA. In some embodiments of a construct for transient expression, the polyA is between 50 and 5000 (SEQ ID NO: 1013), preferably greater than 64, more preferably greater than 100, most preferably greater than 300 or 400. poly(A) sequences can be modified chemically or enzymatically to modulate mRNA functionality such as localization, stability or efficiency of translation.

[0292] As used herein, “polyadenylation” refers to the covalent linkage of a polyadenylyl moiety, or its modified variant, to a messenger RNA molecule. In eukaryotic organisms, most messenger RNA (mRNA) molecules are polyadenylated at the 3′ end. The 3′ poly(A) tail is a long sequence of adenine nucleotides (often several hundred) added to the pre-mRNA through the action of an enzyme, polyadenylate polymerase. In higher eukaryotes, the poly(A) tail is added onto transcripts that contain a specific sequence, the polyadenylation signal. The poly(A) tail and the protein bound to it aid in protecting mRNA from degradation by exonucleases. Polyadenylation is also important for transcription termination, export of the mRNA from the nucleus, and translation. Polyadenylation occurs in the nucleus immediately after transcription of DNA into RNA, but additionally can also occur later in the cytoplasm. After transcription has been terminated, the mRNA chain is cleaved through the action of an endonuclease complex associated with RNA polymerase. The cleavage site is usually characterized by the presence of the base sequence AAUAAA near the cleavage site. After the mRNA has been cleaved, adenosine residues are added to the free 3′ end at the cleavage site.

[0293] As used herein, “transient” refers to expression of a non-integrated transgene for a period of hours, days or weeks, wherein the period of time of expression is less than the period of time for expression of the gene if integrated into the genome or contained within a stable plasmid replicon in the host cell.

[0294] As used herein, the terms “treat”, “treatment” and “treating” refer to the reduction or amelioration of the progression, severity and/or duration of a proliferative disorder, or the amelioration of one or more symptoms (preferably, one or more discernible symptoms) of a proliferative disorder resulting from the administration of one or more therapies (e.g., one or more therapeutic agents such as a CAR of the invention). In specific embodiments, the terms “treat”, “treatment” and “treating” refer to the amelioration of at least one measurable physical parameter of a proliferative disorder, such as growth of a tumor, not necessarily discernible by the patient. In other embodiments the terms “treat”, “treatment” and “treating”-refer to the inhibition of the progression of a proliferative disorder, either physically by, e.g., stabilization of a discernible symptom, physiologically by, e.g., stabilization of a physical parameter, or both. In other embodiments the terms “treat”, “treatment” and “treating” refer to the reduction or stabilization of tumor size or cancerous cell count.

[0295] The term “signal transduction pathway” refers to the biochemical relationship between a variety of signal transduction molecules that play a role in the transmission of a signal from one portion of a cell to another portion of a cell. The phrase “cell surface receptor” includes molecules and complexes of molecules capable of receiving a signal and transmitting signal across the membrane of a cell.

[0296] The term “subject” is intended to include living organisms in which an immune response can be elicited (e.g., mammals, human).

[0297] The term, a “substantially purified” cell refers to a cell that is essentially free of other cell types. A substantially purified cell also refers to a cell which has been separated from other cell types with which it is normally associated in its naturally occurring state. In some instances, a population of substantially purified cells refers to a homogenous population of cells. In other instances, this term refers simply to cell that have been separated from the cells with which they are naturally associated in their natural state. In some embodiments, the cells are cultured in vitro. In other embodiments, the cells are not cultured in vitro.

[0298] The term “therapeutic” as used herein means a treatment. A therapeutic effect is obtained by reduction, suppression, remission, or eradication of a disease state.

[0299] The term “prophylaxis” as used herein means the prevention of or protective treatment for a disease or disease state.

[0300] In the context of the present invention, “tumor antigen” or “hyperproliferative disorder antigen” or “antigen associated with a hyperproliferative disorder” refers to antigens that are common to specific hyperproliferative disorders. In certain embodiments, the hyperproliferative disorder antigens of the present invention are derived from, cancers including but not limited to primary or metastatic melanoma, thymoma, lymphoma, sarcoma, lung cancer, liver cancer, non-Hodgkin lymphoma, Hodgkin lymphoma, leukemias, uterine cancer, cervical cancer, bladder cancer, kidney cancer and adenocarcinomas such as breast cancer, prostate cancer (e.g., castrate-resistant or therapy-resistant prostate cancer, or metastatic prostate cancer), ovarian cancer, pancreatic cancer, and the like, or a plasma cell proliferative disorder, e.g., asymptomatic myeloma (smoldering multiple myeloma or indolent myeloma), monoclonal gammapathy of undetermined significance (MGUS), Waldenstrom's macroglobulinemia, plasmacytomas (e.g., plasma cell dyscrasia, solitary myeloma, solitary plasmacytoma, extramedullary plasmacytoma, and multiple plasmacytoma), systemic amyloid light chain amyloidosis, and POEMS syndrome (also known as Crow-Fukase syndrome, Takatsuki disease, and PEP syndrome).

[0301] The term “transfected” or “transformed” or “transduced” refers to a process by which exogenous nucleic acid is transferred or introduced into the host cell. A “transfected” or “transformed” or “transduced” cell is one which has been transfected, transformed or transduced with exogenous nucleic acid. The cell includes the primary subject cell and its progeny.

[0302] The term “specifically binds,” refers to an antibody, or a ligand, which recognizes and binds with a cognate binding partner (e.g., a stimulatory and/or costimulatory molecule present on a T cell) protein present in a sample, but which antibody or ligand does not substantially recognize or bind other molecules in the sample.

[0303] “Regulatable chimeric antigen receptor (RCAR),” as used herein, refers to a set of polypeptides, typically two in the simplest embodiments, which when in an immune effector cell, provides the cell with specificity for a target cell, typically a cancer cell, and with intracellular signal generation. In some embodiments, an RCAR comprises at least an extracellular antigen binding domain, a transmembrane domain and a cytoplasmic signaling domain (also referred to herein as “an intracellular signaling domain”) comprising a functional signaling domain derived from a stimulatory molecule and/or costimulatory molecule as defined herein in the context of a CAR molecule. In some embodiments, the set of polypeptides in the RCAR are not contiguous with each other, e.g., are in different polypeptide chains. In some embodiments, the RCAR includes a dimerization switch that, upon the presence of a dimerization molecule, can couple the polypeptides to one another, e.g., can couple an antigen binding domain to an intracellular signaling domain. In some embodiments, the RCAR is expressed in a cell (e.g., an immune effector cell) as described herein, e.g., an RCAR-expressing cell (also referred to herein as “RCARX cell”). In some embodiments the RCARX cell is a T cell, and is referred to as a RCART cell. In some embodiments the RCARX cell is an NK cell, and is referred to as a RCARN cell. The RCAR can provide the RCAR-expressing cell with specificity for a target cell, typically a cancer cell, and with regulatable intracellular signal generation or proliferation, which can optimize an immune effector property of the RCAR-expressing cell. In embodiments, an RCAR cell relies at least in part, on an antigen binding domain to provide specificity to a target cell that comprises the antigen bound by the antigen binding domain.

[0304] “Membrane anchor” or “membrane tethering domain”, as that term is used herein, refers to a polypeptide or moiety, e.g., a myristoyl group, sufficient to anchor an extracellular or intracellular domain to the plasma membrane.

[0305] “Switch domain,” as that term is used herein, e.g., when referring to an RCAR, refers to an entity, typically a polypeptide-based entity, that, in the presence of a dimerization molecule, associates with another switch domain. The association results in a functional coupling of a first entity linked to, e.g., fused to, a first switch domain, and a second entity linked to, e.g., fused to, a second switch domain. A first and second switch domain are collectively referred to as a dimerization switch. In embodiments, the first and second switch domains are the same as one another, e.g., they are polypeptides having the same primary amino acid sequence, and are referred to collectively as a homodimerization switch. In embodiments, the first and second switch domains are different from one another, e.g., they are polypeptides having different primary amino acid sequences, and are referred to collectively as a heterodimerization switch. In embodiments, the switch is intracellular. In embodiments, the switch is extracellular. In embodiments, the switch domain is a polypeptide-based entity, e.g., FKBP or FRB-based, and the dimerization molecule is small molecule, e.g., a rapalogue. In embodiments, the switch domain is a polypeptide-based entity, e.g., an scFv that binds a myc peptide, and the dimerization molecule is a polypeptide, a fragment thereof, or a multimer of a polypeptide, e.g., a myc ligand or multimers of a myc ligand that bind to one or more myc scFvs. In embodiments, the switch domain is a polypeptide-based entity, e.g., myc receptor, and the dimerization molecule is an antibody or fragments thereof, e.g., myc antibody.

[0306] “Dimerization molecule,” as that term is used herein, e.g., when referring to an RCAR, refers to a molecule that promotes the association of a first switch domain with a second switch domain. In embodiments, the dimerization molecule does not naturally occur in the subject, or does not occur in concentrations that would result in significant dimerization. In embodiments, the dimerization molecule is a small molecule, e.g., rapamycin or a rapalogue, e.g, RAD001.

[0307] The term “bioequivalent” refers to an amount of an agent other than the reference compound (e.g., RAD001), required to produce an effect equivalent to the effect produced by the reference dose or reference amount of the reference compound (e.g., RAD001). In some embodiments the effect is the level of mTOR inhibition, e.g., as measured by P70 S6 kinase inhibition, e.g., as evaluated in an in vivo or in vitro assay, e.g., as measured by an assay described herein, e.g., the Boulay assay, or measurement of phosphorylated S6 levels by western blot. In some embodiments, the effect is alteration of the ratio of PD-1 positive/PD-1 negative T cells, as measured by cell sorting. In some embodiments a bioequivalent amount or dose of an mTOR inhibitor is the amount or dose that achieves the same level of P70 S6 kinase inhibition as does the reference dose or reference amount of a reference compound. In some embodiments, a bioequivalent amount or dose of an mTOR inhibitor is the amount or dose that achieves the same level of alteration in the ratio of PD-1 positive/PD-1 negative T cells as does the reference dose or reference amount of a reference compound.

[0308] The term “low, immune enhancing, dose” when used in conjunction with an mTOR inhibitor, e.g., an allosteric mTOR inhibitor, e.g., RAD001 or rapamycin, or a catalytic mTOR inhibitor, refers to a dose of mTOR inhibitor that partially, but not fully, inhibits mTOR activity, e.g., as measured by the inhibition of P70 S6 kinase activity. Methods for evaluating mTOR activity, e.g., by inhibition of P70 S6 kinase, are discussed herein. The dose is insufficient to result in complete immune suppression but is sufficient to enhance the immune response. In some embodiments, the low, immune enhancing, dose of mTOR inhibitor results in a decrease in the number of PD-1 positive immune effector cells, e.g., T cells or NK cells, and/or an increase in the number of PD-1 negative immune effector cells, e.g., T cells or NK cells, or an increase in the ratio of PD-1 negative immune effector cells (e.g., T cells or NK cells)/PD-1 positive immune effector cells (e.g., T cells or NK cells).

[0309] In some embodiments, the low, immune enhancing, dose of mTOR inhibitor results in an increase in the number of naive T cells. In some embodiments, the low, immune enhancing, dose of mTOR inhibitor results in one or more of the following:

[0310] an increase in the expression of one or more of the following markers: CD62Lhigh, CD127high, CD27+, and BCL2, e.g., on memory T cells, e.g., memory T cell precursors;

[0311] a decrease in the expression of KLRG1, e.g., on memory T cells, e.g., memory T cell precursors; and

[0312] an increase in the number of memory T cell precursors, e.g., cells with any one or combination of the following characteristics: increased CD62Lhigh, increased CD127high, increased CD27+, decreased KLRG1, and increased BCL2;

[0313] wherein any of the changes described above occurs, e.g., at least transiently, e.g., as compared to a non-treated subject.

[0314] “Refractory” as used herein refers to a disease, e.g., cancer, that does not respond to a treatment. In embodiments, a refractory cancer can be resistant to a treatment before or at the beginning of the treatment. In other embodiments, the refractory cancer can become resistant during a treatment. A refractory cancer is also called a resistant cancer.

[0315] “Relapsed” or a “relapse” as used herein refers to the reappearance of a disease (e.g., cancer) or the signs and symptoms of a disease such as cancer after a period of improvement or responsiveness, e.g., after prior treatment of a therapy, e.g., cancer therapy. For example, the period of responsiveness may involve the level of cancer cells falling below a certain threshold, e.g., below 20%, 15%, 10%, 5%, 4%, 3%, 2%, or 1%. The reappearance may involve the level of cancer cells rising above a certain threshold, e.g., above 20%, 15%, 10%, 5%, 4%, 3%, 2%, or 1%.

[0316] In some embodiments, a “responder” of a therapy can be a subject having complete response, very good partial response, or partial response after receiving the therapy. In some embodiments, a “non-responder” of a therapy can be a subject having minor response, stable disease, or progressive disease after receiving the therapy. In some embodiments, the subject has multiple myeloma and the response of the subject to a multiple myeloma therapy is determined based on IMWG 2016 criteria, e.g., as disclosed in Kumar, et al., Lancet Oncol. 17, e328-346 (2016), hereby incorporated herein by reference in its entirety, e.g., as described in Table 16.

[0317] Ranges: throughout this disclosure, various embodiments of the invention can be presented in a range format. It should be understood that the description in range format is merely for convenience and brevity and should not be construed as an inflexible limitation on the scope of the invention. Accordingly, the description of a range should be considered to have specifically disclosed all the possible subranges as well as individual numerical values within that range. For example, description of a range such as from 1 to 6 should be considered to have specifically disclosed subranges such as from 1 to 3, from 1 to 4, from 1 to 5, from 2 to 4, from 2 to 6, from 3 to 6 etc., as well as individual numbers within that range, for example, 1, 2, 2.7, 3, 4, 5, 5.3, and 6. As another example, a range such as 95-99% identity, includes something with 95%, 96%, 97%, 98% or 99% identity, and includes subranges such as 96-99%, 96-98%, 96-97%, 97-99%, 97-98% and 98-99% identity. This applies regardless of the breadth of the range.

[0318] A “gene editing system” as the term is used herein, refers to a system, e.g., one or more molecules, that direct and effect an alteration, e.g., a deletion, of one or more nucleic acids at or near a site of genomic DNA targeted by said system. Gene editing systems are known in the art, and are described more fully below.

[0319] The term “cognate antigen molecule” refers to any antigen described herein. In some embodiments, it refers to an antigen bound, e.g., recognized or targeted, by a CAR polypeptide, e.g., any target CAR described herein. In some embodiments, it refers to a cancer associated antigen described herein. In some embodiments, the cognate antigen molecule is a recombinant molecule.

[0320] The term “IL-15 receptor molecule” as used herein refers to a full-length naturally-occurring IL-15 receptor alpha (IL-15Ra) (e.g., a mammalian IL-15Ra, e.g., human IL-15Ra, e.g., GenBank Accession Number AAI21141.1), a functional fragment of IL-15Ra, or an active variant having at least 80%, 85%, 90%, 95%, 96%, 97%, 98%, or 99% sequence identity to a naturally-occurring wild type polypeptide of IL-15Ra or fragment thereof. In some embodiments, the variant is a derivative, e.g., a mutant, of a wild type polypeptide or nucleic acid encoding the same. In some embodiments, the IL-15Ra variant, e.g., active variant of IL-15Ra, has at least 50%, 60%, 70%, 80%, 85%, 90%, 95%, 96%, 97%, 98%, 99% or 100% activity of the wild type IL-15Ra polypeptide. In some embodiments, the IL-15Ra molecule comprises one or more post-translational modifications. As used herein, the terms IL-15R and IL-15Ra are interchangeable.

[0321] The term “IL-15 molecule” as used herein refers to a full-length naturally-occurring IL-15 (e.g., a mammalian IL-15, e.g., human IL-15, e.g., GenBank Accession Number AAI00963.1), a functional fragment of IL-15, or an active variant having at least 80%, 85%, 90%, 95%, 96%, 97%, 98%, or 99% sequence identity to a naturally-occurring wild type polypeptide of IL-15 or fragment thereof. In some embodiments, the variant is a derivative, e.g., a mutant, of a wild type polypeptide or nucleic acid encoding the same. In some embodiments, the IL-15 variant, e.g., active variant of IL-15, has at least 50%, 60%, 70%, 80%, 85%, 90%, 95%, 96%, 97%, 98%, 99% or 100% activity of the wild type IL-15 polypeptide. In some embodiments, the IL-15 molecule comprises one or more post-translational modifications.

[0322] As used herein, an “active variant” of a cytokine molecule refers to a cytokine variant having at least 50%, 60%, 70%, 80%, 85%, 90%, 95%, 96%, 97%, 98%, 99% or 100% activity of wild type cytokine, e.g., as measured by an art-recognized assay.

[0323] Various embodiments of the compositions and methods herein are described in further detail below. Additional definitions are set out throughout the specification.

### DETAILED DESCRIPTION

[0324] The present invention provides, inter alia, a modified immune effector cell comprising a chimeric antigen receptor (CAR), having an increased level, expression, and/or activity of a TOX-family protein (“TOX^{hi} CAR cell”), methods of making the same, and uses thereof. In some embodiments, the level, expression, and/or activity of a TOX family protein, e.g., TOX2 protein, in said immune effector cell is increased compared to a control cell, e.g., as described herein. The invention further discloses TOX2 proteins and TOX2 modulators that can be used to make a TOX^{hi} CAR cell, or a population of said cells. TOX2 proteins and TOX2 modulators, CAR molecules, TOX^{hi} CAR cell (e.g., populations of TOX^{hi} CAR cell), and methods of use thereof are further described below.

### TOX Family Proteins and Modulators

[0325] The TOX family of proteins includes at least four isoforms (TOX, TOX2, TOX3 and TOX4). In humans TOX is located on chromosome 20. TOX family proteins typically include a 69-amino acid high mobility group (HMG)-box DNA binding domain, plus a putative nuclear localization signal. The HMG box domain typically consists of three α-helices that form an 80° L-shape, binding to the minor groove of DNA, expanding it, and compressing the major groove. In the process, certain amino acid residues intercalate into the DNA, allowing HMG-box proteins to induce bends. The interaction between the HMG-box bending of DNA or interaction with chromatin in vivo is still being characterized.

[0326] TOX high mobility group box family member 2 (“TOX2”) is a member of the TOX family. TOX2 is a nuclear DNA-binding protein primarily expressed in the lymph nodes. Without wishing to be bound by theory, TOX 2 is believed to be involved in, e.g., the development of natural killer (NK) cells, where TOX2 is believed to activate the promoter of T-BET, an immune-promoting transcription factor. T-BET in turn is capable of repressing inhibitory receptor PD-1. Consistent with a role for TOX2 in promoting T cell function, lower levels of PD-1 predict better response to CAR T therapy. Without wishing to be bound by theory, it is believed that in some embodiments, overexpression of TOX2 could result in lowering of PD-1 levels by raising T-BET levels. Furthermore, T cells with the TET2 knockdown display an increased expression of TOX2, (see, e.g., Example 1 and FIG. 1).

[0327] Accordingly, in some embodiments, disclosed herein is a modified immune effector cell expressing a CAR, wherein said immune effector cell has an increased level, expression, and/or activity of a TOX-family protein (“TOX^{hi} CAR cell”).

[0328] In some embodiments, the TOX family protein is chosen from a TOX protein, TOX2 protein, TOX3 protein or TOX4 protein, e.g., a human TOX protein, TOX2 protein, TOX3 protein or TOX4 protein.

[0329] In some embodiments, an immune effector cell disclosed herein, or a population of immune effector cells disclosed herein can be treated and/or genetically engineered to have an increased expression, activity and/or level of a TOX family protein, e.g., TOX2 protein.

[0330] In some embodiments, treating comprises contacting the immune effector cell or population of immune effector cell with a TOX modulator, e.g., a TOX2 modulator. In some embodiments, a TOX2 modulator is a molecule that regulates TOX2, or a molecule that targets a regulator of TOX2, e.g., an upstream regulator of TOX2. In some embodiments, a TOX2 modulator results in an increased level, expression, and/or activity of TOX2. In some embodiments, the increased level, expression, and/or activity of TOX2 is compared to an otherwise similar cell not contacted with a TOX2 modulator, or prior to contacting with a TOX2 modulator. In some embodiments, a TOX2 modulator is a molecule that increases the transcription of TOX2 mRNA (e.g., a molecule that increases chromatin accessibility of the TOX2 promoter or regulatory element). In some embodiments, a TOX2 modulator is a molecule that increases the translation of TOX2 protein. In some embodiments, a TOX2 modulator is a molecule that increases the stability of TOX2, e.g., TOX2 mRNA or protein.

[0331] In some embodiments, a TOX2 modulator is a molecule that increases the activity of TOX2, e.g., a DNA binding activity of TOX2.

[0332] In some embodiments, a TOX2 modulator is an antibody molecule that binds to the TOX2 protein or a TOX2 modulator. In some embodiments, a TOX2 modulator is an antibody molecule (e.g., an agonist antibody that binds a TOX2 modulator, or an antibody molecule that binds a TOX2 inhibitor).

[0333] In some embodiments, a TOX2 modulator is a low molecular weight compound that increases the level, expression, and/or activity of TOX2.

[0334] In some embodiments, a TOX2 modulator is a molecule targeting a direct or an indirect inhibitor of TOX2, e.g., a RNAi agent, a CRISPR, a TALEN, or a zinc finger nuclease, targeting an inhibitor of TOX2. An example of a TOX2 modulator that inhibits an inhibitor of TOX2 is a gene editing system, e.g., as described herein, that is targeted to a nucleic acid sequence within the gene that inhibits TOX2, or its regulatory elements, such that modification of the nucleic acid sequence at or near the gene editing system binding site(s) is modified to reduce or eliminate expression of the inhibitor of TOX2, thus increasing the level, expression, and/or activity of TOX2. Another example of a TOX2 modulator that inhibits an inhibitor of TOX2, is a nucleic acid molecule, e.g., RNA molecule, e.g., a short hairpin RNA (shRNA) or short interfering RNA (siRNA), capable of hybridizing with the mRNA of an inhibitor of TOX2, and causing a reduction or elimination of translation of the inhibitor of TOX2, thus increasing the level, expression, and/or activity of TOX2.

[0335] In some embodiments, a TOX2 modulator is an inhibitor of an inhibitor of TOX2, e.g., Tet2. In some embodiments, a TOX2 modulator is an inhibitor of Tet2. Exemplary Tet2 inhibitors are disclosed in International Application PCT/US2016/052260 filed on Sep. 16, 206, the entire contents of which are hereby incorporated by reference.

[0336] In some embodiments, the Tet2 inhibitor is a CRISPR/Cas system. In some embodiments, the CRISPR/Cas system comprises Cas9, e.g., S. pyogenes Cas9, and a gRNA comprising a targeting sequence which hybridizes to a sequence of the Tet2 gene. Exemplary gRNAs targeting Tet2 are disclosed in Tables 2-3 of PCT/US2016/052260, the entire contents of which are hereby incorporated by reference.

[0337] In some embodiments, the Tet2 inhibitor is a small molecule that inhibits expression and/or a function of Tet2. In some embodiments, the Tet2 inhibitor is 2-hydroxyglutarate (CAS #2889-31-8). In some embodiments, the Tet2 inhibitor is invention is N-[3-[7-(2,5-Dimethyl-2H-pyrazol-3-ylamino)-1-methyl-2-oxo-1,4-dihydro-2H-pyrimido[4,5-d]pyrimidin-3-yl]-4-methylphenyl]-3-trifluoromethyl-benzamide (CAS #839707-37-8).

### TOX2

[0338] In some embodiments, the TOX family protein is TOX2 protein, e.g., a TOX2 protein or TOX2 protein as described herein. In some embodiments, TOX2 is also known as: GCX1; GCX-1; C20orf100; dJ49503.1; or dJ1108D11.2.

[0339] In some embodiments of any of the compositions, methods or uses, disclosed herein, a TOX2 protein comprises an amino acid sequence having at least 80%, 85%, 90%, 95%, 96%, 97%, 98%, or 99% sequence identity to the amino acid sequence of SEQ ID NO: 2000, SEQ ID NO: 2001, SEQ ID NO: 2002 or SEQ ID NO: 2003. In some embodiments, the TOX2 protein comprises the amino acid sequence of SEQ ID NO: 2000, SEQ ID NO: 2001, SEQ ID NO: 2002 or SEQ ID NO: 2003.

[0340] In some embodiments of any of the compositions, methods, or uses, disclosed herein, the TOX2 protein is encoded by a nucleotide sequence having at least 80%, 85%, 90%, 95%, 96%, 97%, 98%, or 99% sequence identity to the nucleotide sequence of SEQ ID NO: 2004, SEQ ID NO: 2005, SEQ ID NO: 2006 or SEQ ID NO: 2007. In some embodiments, the TOX2 protein is encoded by the nucleotide sequence of SEQ ID NO: 2004, SEQ ID NO: 2005, SEQ ID NO: 2006 or SEQ ID NO: 2007.

[0341] In some embodiments, an immune effector cell described herein, e.g., a CAR-expressing immune effector cell, comprises a nucleic acid sequence, e.g., a transgene, comprising the sequence of SEQ ID NO: 2004, SEQ ID NO: 2005, SEQ ID NO: 2006 or SEQ ID NO: 2007.

### TOX2 Sequences

| Isoform C (transcript variant 4): | |
|---|---|
| Amino acid: NP_001092266.1 | |
| (SEQ ID NO: 2000) | |
| 1 | msdgnpells tsqtyngqse nnedyeippi tppnlpepsl lhlgdheasy hslchgltpn |
| 61 | gllpaysyqa mdlpaimvsn mlaqdshlls gqlptiqemv hsevaaydsg rpgpllgrpa |
| 121 | mlashmsals qsqlisqmgi rssiahssps ppgsksatps pssstqeees evhfkisgek |
| 181 | rpsadpgkka knpkkkkkkd pnepqkpvsa yalffrdtqa aikgqnpsat fgdvskivas |
| 241 | mwdslgeeqk qaykrkteaa kkeylkalaa yraslvskss pdqgetkstq anppakmlpp |
| 301 | kqpmyampgl asfltpsdlq afrsgaspas lartlgsksl lpglsasppp ppsfplsptl |
| 361 | hqqlslppha qgallsppvs mspapqppvl ptpmalqvql amspsppgpq dfphisefps |
| 421 | ssgscspgps nptssgdwds sypsgecgis tcsllprdks lylt |
| Coding sequence: NM_001098796.1 | |
| (SEQ ID NO: 2004) | |
| 1 | gattgaacag cgcgcgtggg tttcccgcag ccctggcgca gacgcgtggg ctccgtggcg |
| 61 | atgcgggttt gatggtgaca gtgcctacgt ggggatgagt gacggaaacc cagagctcct |
| 121 | gtcaaccagc cagacctaca acggccagag cgagaacaac gaagactatg agatcccccc |
| 181 | gataacacct cccaacctcc cggagccatc cctcctgcac ctgggggacc acgaagccag |
| 241 | ctaccactcg ctgtgccacg gcctcacccc caacggtctg ctccctgcct actcctatca |
| 301 | ggccatggac ctcccagcca tcatggtgtc caacatgcta gcacaggaca gccacctgct |
| 361 | gtcgggccag ctgcccacga tccaggagat ggtccactcg gaagtggctg cctatgactc |
| 421 | gggccggccc gggcccctgc tgggtcgccc ggcaatgctg gccagccaca tgagtgccct |
| 481 | cagccagtcc cagctcatct cgcagatggg catccggagc agcatcgccc acagctcccc |
| 541 | atcaccgccg gggagcaagt cagcgacccc ctctccctcc agctccactc aggaagagga |
| 601 | gtcggaagtg catttcaaga tctcgggaga aaagagacct tcagccgacc caggaaaaaa |
| 661 | ggccaagaac ccgaagaaga agaaaaagaa ggaccccaat gagccgcaga agcctgtgtc |
| 721 | ggcctacgca ctcttcttca gagacactca ggccgccatc aagggtcaga accccagtgc |
| 781 | cactttcggt gacgtgtcca aaatcgtggc ctccatgtgg gacagcctgg gagaggaaca |
| 841 | gaagcaggcc tacaagagga agacagaagc agcaaagaag gaatatctga aggccctggc |
| 901 | agcctaccgg gctagcctcg tctccaagag ctccccagat caaggtgaga ccaagagcac |
| 961 | tcaggcaaac ccaccagcca aaatgctccc acccaagcag cccatgtatg ccatgccagg |
| 1021 | cctggcctcc ttcctgacgc cgtcggacct gcaggccttc cgcagtgggg cctcccctgc |
| 1081 | cagcctcgcc cggacgctgg gctccaagtc tctgctgcca ggcctcagtg cgtccccgcc |
| 1141 | gccgccaccc tccttcccgc tcagccccac actgcaccag cagctgtcac tgccccctca |
| 1201 | cgcccagggc gccctcctca gtccacctgt tagcatgtcc ccagcccccc agccccctgt |
| 1261 | cctgcccacc cccatggcac tccaggtgca gctggcgatg agcccctcac ctccagggcc |
| 1321 | acaggacttc ccgcacatct ctgagttccc cagcagctcg ggatcctgct cacctggccc |
| 1381 | atccaacccc accagcagcg gggactggga cagcagctac cccagtgggg agtgtggcat |
| 1441 | cagcacctgc agcctgctcc ccagggacaa atcgctctac ctcacctaat cccgcctccc |
| 1501 | taccatccct gaggctcgct ggaaggcact gctcagagcc tgaagggctg acagcagaaa |
| 1561 | agaggccctg gccagaggca gggtggccca tcggagagag cagtgacaca cccattgccc |
| 1621 | gggggctgag tctcttcctc aacctcccac cagactctgc agaggcagcc cactgcccac |
| 1681 | caccagccca aagaacctgc aggaaccttc cgcccgctga cctgcttgct ccagggtaac |
| 1741 | tgtggaccct gtcctcgccc tgcgcacggt accctatgtc tggacacccg gccccagctc |
| 1801 | cagccccagc ccaggtgggc cgcccctggc ggggtcgctt accaacggac acccacccca |
| 1861 | gatgcatggg ccagagggcc ggcccccggc atagatgtgc acatcggttt tccagtgtga |
| 1921 | acaaaagatt acgaaaccta gaaactgttg gttccgtgta agtagttgac tacgtgtttt |
| 1981 | agaactgtgc tgaagacatc tgtaagacta ttttgtgggg gaaaaaagta gtttccttta |
| 2041 | aggtaaaaag cattttatat gatccttagc acatttttaa gttttatctt aagggagacg |
| 2101 | cgcacaaaag cggctgccaa accgtttcgt catcctcaca gcaaggaccg gacgcttgct |
| 2161 | agccaccccg gagcactgct ctccttttaa tcatgtattc atctatttta aattgccggc |
| 2221 | gacgactttt gtctatttat gaagaaacct tgagaacgaa gttacagctt atcctaccgt |
| 2281 | gtgtgtggtt ttggggtttc gtttgggttt gggttcttga cgtcgtttgc agctgtttcc |
| 2341 | tggccctggc gagtgtctgt cttggtgccc agtgcttctc tcaaatctct ttataataaa |
| 2401 | acttctgaaa agctgaaaaa aaaaaaaaaa aaa |
| Isoform A (transcript variant 1) | |
| Amino acid: NP_001092267.1 | |
| (SEQ ID NO: 2001) | |
| 1 | mdvrlypsap avgarpgaep aglahldyyh ggkfdgdsay vgmsdgnpel lstsqtyngq |
| 61 | sennedyeip pitppnlpep sllhlgdhea syhslchglt pngllpaysy qamdlpaimv |
| 121 | snmlaqdshl lsgqlptiqe mvhsevaayd sgrpgpllgr pamlashmsa lsqsqlisqm |
| 181 | girssiahss psppgsksat pspssstqee esevhfkisg ekrpsadpgk kaknpkkkkk |
| 241 | kdpnepqkpv sayalffrdt qaaikgqnps atfgdvskiv asmwdslgee qkqaykrkte |
| 301 | aakkeylkal aayraslvsk sspdqgetks tqanppakml ppkqpmyamp glasfltpsd |
| 361 | lqafrsgasp aslartlgsk sllpglsasp ppppsfplsp tlhqqlslpp haqgallspp |
| 421 | vsmspapqpp vlptpmalqv qlamspsppg pqdfphisef psssgscspg psnptssgdw |
| 481 | dssypsgecg istcsllprd kslylt |
| Coding sequence: NM_001098797.2 | |
| (SEQ ID NO: 2005) | |
| 1 | actgcccgcg ggagccgccg ccgccgccgc cgcgcccgcc atggacgtcc gcctgtaccc |
| 61 | ctcggcgccc gcggtgggcg cgcggcccgg ggccgagccg gccggcctgg cgcacctgga |
| 121 | ctattaccac ggcggcaagt ttgatggtga cagtgcctac gtggggatga gtgacggaaa |
| 181 | cccagagctc ctgtcaacca gccagaccta caacggccag agcgagaaca acgaagacta |
| 241 | tgagatcccc ccgataacac ctcccaacct cccggagcca tccctcctgc acctggggga |
| 301 | ccacgaagcc agctaccact cgctgtgcca cggcctcacc cccaacggtc tgctccctgc |
| 361 | ctactcctat caggccatgg acctcccagc catcatggtg tccaacatgc tagcacagga |
| 421 | cagccacctg ctgtcgggcc agctgcccac gatccaggag atggtccact cggaagtggc |
| 481 | tgcctatgac tcgggccggc ccgggcccct gctgggtcgc ccggcaatgc tggccagcca |
| 541 | catgagtgcc ctcagccagt cccagctcat ctcgcagatg ggcatccgga gcagcatcgc |
| 601 | ccacagctcc ccatcaccgc cggggagcaa gtcagcgacc ccctctccct ccagctccac |
| 661 | tcaggaagag gagtcggaag tgcatttcaa gatctcggga gaaaagagac cttcagccga |
| 721 | cccaggaaaa aaggccaaga acccgaagaa gaagaaaaag aaggacccca atgagccgca |
| 781 | gaagcctgtg tcggcctacg cactcttctt cagagacact caggccgcca tcaagggtca |
| 841 | gaaccccagt gccactttcg gtgacgtgtc caaaatcgtg gcctccatgt gggacagcct |
| 901 | gggagaggaa cagaagcagg cctacaagag gaagacagaa gcagcaaaga aggaatatct |
| 961 | gaaggccctg gcagcctacc gggctagcct cgtctccaag agctccccag atcaaggtga |
| 1021 | gaccaagagc actcaggcaa acccaccagc caaaatgctc ccacccaagc agcccatgta |
| 1081 | tgccatgcca ggcctggcct ccttcctgac gccgtcggac ctgcaggcct tccgcagtgg |
| 1141 | ggcctcccct gccagcctcg cccggacgct gggctccaag tctctgctgc caggcctcag |
| 1201 | tgcgtccccg ccgccgccac cctccttccc gctcagcccc acactgcacc agcagctgtc |
| 1261 | actgccccct cacgcccagg gcgccctcct cagtccacct gttagcatgt ccccagcccc |
| 1321 | ccagccccct gtcctgccca cccccatggc actccaggtg cagctggcga tgagcccctc |
| 1381 | acctccaggg ccacaggact tcccgcacat ctctgagttc cccagcagct cgggatcctg |
| 1441 | ctcacctggc ccatccaacc ccaccagcag cggggactgg gacagcagct accccagtgg |
| 1501 | ggagtgtggc atcagcacct gcagcctgct ccccagggac aaatcgctct acctcaccta |
| 1561 | atcccgcctc cctaccatcc ctgaggctcg ctggaaggca ctgctcagag cctgaagggc |
| 1621 | tgacagcaga aaagaggccc tggccagagg cagggtggcc catcggagag agcagtgaca |
| 1681 | cacccattgc ccgggggctg agtctcttcc tcaacctccc accagactct gcagaggcag |
| 1741 | cccactgccc accaccagcc caaagaacct gcaggaacct tccgcccgct gacctgcttg |
| 1801 | ctccagggta actgtggacc ctgtcctcgc cctgcgcacg gtaccctatg tctggacacc |
| 1861 | cggccccagc tccagcccca gcccaggtgg gccgcccctg gcggggtcgc ttaccaacgg |
| 1921 | acacccaccc cagatgcatg ggccagaggg ccggcccccg gcatagatgt gcacatcggt |
| 1981 | tttccagtgt gaacaaaaga ttacgaaacc tagaaactgt tggttccgtg taagtagttg |
| 2041 | actacgtgtt ttagaactgt gctgaagaca tctgtaagac tattttgtgg gggaaaaaag |
| 2101 | tagtttcctt taaggtaaaa agcattttat atgatcctta gcacattttt aagttttatc |
| 2161 | ttaagggaga cgcgcacaaa agcggctgcc aaaccgtttc gtcatcctca cagcaaggac |
| 2221 | cggacgcttg ctagccaccc cggagcactg ctctcctttt aatcatgtat tcatctattt |
| 2281 | taaattgccg gcgacgactt ttgtctattt atgaagaaac cttgagaacg aagttacagc |
| 2341 | ttatcctacc gtgtgtgtgg ttttggggtt tcgtttgggt ttgggttctt gacgtcgttt |
| 2401 | gcagctgttt cctggccctg gcgagtgtct gtcttggtgc ccagtgcttc tctcaaatct |
| 2461 | ctttataata aaacttctga aaagctgaaa a |
| Isoform B (transcript variant 2) | |
| Amino acid: NP_001092268.1 | |
| (SEQ ID NO: 2002) | |
| 1 | mqqtrteava gafsrclgfc gmrlglllla rhwciagvfp qkfdgdsayv gmsdgnpell |
| 61 | stsqtyngqs ennedyeipp itppnlpeps llhlgdheas yhslchgltp ngllpaysyq |
| 121 | amdlpaimvs nmlaqdshll sgqlptiqem vhsevaayds grpgpllgrp amlashmsal |
| 181 | sqsqlisqmg irssiahssp sppgsksatp spssstqeee sevhfkisge krpsadpgkk |
| 241 | aknpkkkkkk dpnepqkpvs ayalffrdtq aaikgqnpsa tfgdvskiva smwdslgeeq |
| 301 | kqsspdgget kstqanppak mlppkqpmya mpglasfltp sdlqafrsga spaslartlg |
| 361 | sksllpglsa spppppsfpl sptlhqq1s1 pphaqgalls ppvsmspapq ppvlptpmal |
| 421 | qvqlamspsp pgpqdfphis efpsssgscs pgpsnptssg dwdssypsge cgistcsllp |
| 481 | rdkslylt |
| Coding sequence: NM_001098798.1 | |
| (SEQ ID NO: 2006) | |
| 1 | ctctttctct gctgattatg cagcagactc gcacagaggc tgtcgcgggc gcgttctctc |
| 61 | gctgcctggg cttctgtgga atgagactcg ggctccttct acttgcaaga cactggtgca |
| 121 | ttgcaggtgt gtttccgcag aagtttgatg gtgacagtgc ctacgtgggg atgagtgacg |
| 181 | gaaacccaga gctcctgtca accagccaga cctacaacgg ccagagcgag aacaacgaag |
| 241 | actatgagat ccccccgata acacctccca acctcccgga gccatccctc ctgcacctgg |
| 301 | gggaccacga agccagctac cactcgctgt gccacggcct cacccccaac ggtctgctcc |
| 361 | ctgcctactc ctatcaggcc atggacctcc cagccatcat ggtgtccaac atgctagcac |
| 421 | aggacagcca cctgctgtcg ggccagctgc ccacgatcca ggagatggtc cactcggaag |
| 481 | tggctgccta tgactcgggc cggcccgggc ccctgctggg tcgcccggca atgctggcca |
| 541 | gccacatgag tgccctcagc cagtcccagc tcatctcgca gatgggcatc cggagcagca |
| 601 | tcgcccacag ctccccatca ccgccgggga gcaagtcagc gaccccctct ccctccagct |
| 661 | ccactcagga agaggagtcg gaagtgcatt tcaagatctc gggagaaaag agaccttcag |
| 721 | ccgacccagg aaaaaaggcc aagaacccga agaagaagaa aaagaaggac cccaatgagc |
| 781 | cgcagaagcc tgtgtcggcc tacgcactct tcttcagaga cactcaggcc gccatcaagg |
| 841 | gtcagaaccc cagtgccact ttcggtgacg tgtccaaaat cgtggcctcc atgtgggaca |
| 901 | gcctgggaga ggaacagaag cagagctccc cagatcaagg tgagaccaag agcactcagg |
| 961 | caaacccacc agccaaaatg ctcccaccca agcagcccat gtatgccatg ccaggcctgg |
| 1021 | cctccttcct gacgccgtcg gacctgcagg ccttccgcag tggggcctcc cctgccagcc |
| 1081 | tcgcccggac gctgggctcc aagtctctgc tgccaggcct cagtgcgtcc ccgccgccgc |
| 1141 | caccctcctt cccgctcagc cccacactgc accagcagct gtcactgccc cctcacgccc |
| 1201 | agggcgccct cctcagtcca cctgttagca tgtccccagc cccccagccc cctgtcctgc |
| 1261 | ccacccccat ggcactccag gtgcagctgg cgatgagccc ctcacctcca gggccacagg |
| 1321 | acttcccgca catctctgag ttccccagca gctcgggatc ctgctcacct ggcccatcca |
| 1381 | accccaccag cagcggggac tgggacagca gctaccccag tggggagtgt ggcatcagca |
| 1441 | cctgcagcct gctccccagg gacaaatcgc tctacctcac ctaatcccgc ctccctacca |
| 1501 | tccctgaggc tcgctggaag gcactgctca gagcctgaag ggctgacagc agaaaagagg |
| 1561 | ccctggccag aggcagggtg gcccatcgga gagagcagtg acacacccat tgcccggggg |
| 1621 | ctgagtctct tcctcaacct cccaccagac tctgcagagg cagcccactg cccaccacca |
| 1681 | gcccaaagaa cctgcaggaa ccttccgccc gctgacctgc ttgctccagg gtaactgtgg |
| 1741 | accctgtcct cgccctgcgc acggtaccct atgtctggac acccggcccc agctccagcc |
| 1801 | ccagcccagg tgggccgccc ctggcggggt cgcttaccaa cggacaccca ccccagatgc |
| 1861 | atgggccaga gggccggccc ccggcataga tgtgcacatc ggttttccag tgtgaacaaa |
| 1921 | agattacgaa acctagaaac tgttggttcc gtgtaagtag ttgactacgt gttttagaac |
| 1981 | tgtgctgaag acatctgtaa gactattttg tgggggaaaa aagtagtttc ctttaaggta |
| 2041 | aaaagcattt tatatgatcc ttagcacatt tttaagtttt atcttaaggg agacgcgcac |
| 2101 | aaaagcggct gccaaaccgt ttcgtcatcc tcacagcaag gaccggacgc ttgctagcca |
| 2161 | ccccggagca ctgctctcct tttaatcatg tattcatcta ttttaaattg ccggcgacga |
| 2221 | cttttgtcta tttatgaaga aaccttgaga acgaagttac agcttatcct accgtgtgtg |
| 2281 | tggttttggg gtttcgtttg ggtttgggtt cttgacgtcg tttgcagctg tttcctggcc |
| 2341 | ctggcgagtg tctgtcttgg tgcccagtgc ttctctcaaa tctctttata ataaaacttc |
| 2401 | tgaaaagctg aaaaaaaaaa aaaaaaaa |
| Transcript variant 4 | |
| Amino acid: NP_116272.1 | |
| (SEQ ID NO: 2003) | |
| 1 | msdgnpells tsqtyngqse nnedyeippi tppnlpepsl lhlgdheasy hslchgltpn |
| 61 | gllpaysyqa mdlpaimvsn mlaqdshlls gqlptiqemv hsevaaydsg rpgpllgrpa |
| 121 | mlashmsals qsqlisqmgi rssiahssps ppgsksatps pssstqeees evhfkisgek |
| 181 | rpsadpgkka knpkkkkkkd pnepqkpvsa yalffrdtqa aikgqnpsat fgdvskivas |
| 241 | mwdslgeeqk qaykrkteaa kkeylkalaa yraslvskss pdqgetkstq anppakmlpp |
| 301 | kqpmyampgl asfltpsdlq afrsgaspas lartlgsksl lpglsasppp ppsfplsptl |
| 361 | hqqlslppha qgallsppvs mspapqppvl ptpmalqvql amspsppgpq dfphisefps |
| 421 | ssgscspgps nptssgdwds sypsgecgis tcsllprdks lylt |
| Coding sequence: NM_032883.2 | |
| (SEQ ID NO: 2007) | |
| 1 | gattgaacag cgcgcgtggg tttcccgcag ccctggcgca gacgcgtggg ctccgtggcg |
| 61 | atgcggggtg ttgcctgagg ctccactgaa gctatggcat aatttgcaga atttgcactt |
| 121 | cattactttt ctgaaattca aacaaattct gaaactgcac gagttctggc tgagagctgt |
| 181 | ggatctgtgc attttgatgg tgacagtgcc tacgtgggga tgagtgacgg aaacccagag |
| 241 | ctcctgtcaa ccagccagac ctacaacggc cagagcgaga acaacgaaga ctatgagatc |
| 301 | cccccgataa cacctcccaa cctcccggag ccatccctcc tgcacctggg ggaccacgaa |
| 361 | gccagctacc actcgctgtg ccacggcctc acccccaacg gtctgctccc tgcctactcc |
| 421 | tatcaggcca tggacctccc agccatcatg gtgtccaaca tgctagcaca ggacagccac |
| 481 | ctgctgtcgg gccagctgcc cacgatccag gagatggtcc actcggaagt ggctgcctat |
| 541 | gactcgggcc ggcccgggcc cctgctgggt cgcccggcaa tgctggccag ccacatgagt |
| 601 | gccctcagcc agtcccagct catctcgcag atgggcatcc ggagcagcat cgcccacagc |
| 661 | tccccatcac cgccggggag caagtcagcg accccctctc cctccagctc cactcaggaa |
| 721 | gaggagtcgg aagtgcattt caagatctcg ggagaaaaga gaccttcagc cgacccagga |
| 781 | aaaaaggcca agaacccgaa gaagaagaaa aagaaggacc ccaatgagcc gcagaagcct |
| 841 | gtgtcggcct acgcactctt cttcagagac actcaggccg ccatcaaggg tcagaacccc |
| 901 | agtgccactt tcggtgacgt gtccaaaatc gtggcctcca tgtgggacag cctgggagag |
| 961 | gaacagaagc aggcctacaa gaggaagaca gaagcagcaa agaaggaata tctgaaggcc |
| 1021 | ctggcagcct accgggctag cctcgtctcc aagagctccc cagatcaagg tgagaccaag |
| 1081 | agcactcagg caaacccacc agccaaaatg ctcccaccca agcagcccat gtatgccatg |
| 1141 | ccaggcctgg cctccttcct gacgccgtcg gacctgcagg ccttccgcag tggggcctcc |
| 1201 | cctgccagcc tcgcccggac gctgggctcc aagtctctgc tgccaggcct cagtgcgtcc |
| 1261 | ccgccgccgc caccctcctt cccgctcagc cccacactgc accagcagct gtcactgccc |
| 1321 | cctcacgccc agggcgccct cctcagtcca cctgttagca tgtccccagc cccccagccc |
| 1381 | cctgtcctgc ccacccccat ggcactccag gtgcagctgg cgatgagccc ctcacctcca |
| 1441 | gggccacagg acttcccgca catctctgag ttccccagca gctcgggatc ctgctcacct |
| 1501 | ggcccatcca accccaccag cagcggggac tgggacagca gctaccccag tggggagtgt |
| 1561 | ggcatcagca cctgcagcct gctccccagg gacaaatcgc tctacctcac ctaatcccgc |
| 1621 | ctccctacca tccctgaggc tcgctggaag gcactgctca gagcctgaag ggctgacagc |
| 1681 | agaaaagagg ccctggccag aggcagggtg gcccatcgga gagagcagtg acacacccat |
| 1741 | tgcccggggg ctgagtctct tcctcaacct cccaccagac tctgcagagg cagcccactg |
| 1801 | cccaccacca gcccaaagaa cctgcaggaa ccttccgccc gctgacctgc ttgctccagg |
| 1861 | gtaactgtgg accctgtcct cgccctgcgc acggtaccct atgtctggac acccggcccc |
| 1921 | agctccagcc ccagcccagg tgggccgccc ctggcggggt cgcttaccaa cggacaccca |
| 1981 | ccccagatgc atgggccaga gggccggccc ccggcataga tgtgcacatc ggttttccag |
| 2041 | tgtgaacaaa agattacgaa acctagaaac tgttggttcc gtgtaagtag ttgactacgt |
| 2101 | gttttagaac tgtgctgaag acatctgtaa gactattttg tgggggaaaa aagtagtttc |
| 2161 | ctttaaggta aaaagcattt tatatgatcc ttagcacatt tttaagtttt atcttaaggg |
| 2221 | agacgcgcac aaaagcggct gccaaaccgt ttcgtcatcc tcacagcaag gaccggacgc |
| 2281 | ttgctagcca ccccggagca ctgctctcct tttaatcatg tattcatcta ttttaaattg |
| 2341 | ccggcgacga cttttgtcta tttatgaaga aaccttgaga acgaagttac agcttatcct |
| 2401 | accgtgtgtg tggttttggg gtttcgtttg ggtttgggtt cttgacgtcg tttgcagctg |
| 2461 | tttcctggcc ctggcgagtg tctgtcttgg tgcccagtgc ttctctcaaa tctctttata |
| 2521 | ataaaacttc tgaaaagctg aaaaaaaaaa aaaaaaaa |

### TOX

[0343] In some embodiments, the TOX family protein is a TOX protein, e.g., a TOX protein or TOX molecule as described herein. In some embodiments, TOX1 is also known as: as

[0344] Thymocyte Selection Associated High Mobility Group Box 2 3 5, Thymocyte Selection-Associated High Mobility Group Box Protein TOX 3 4, Thymus High Mobility Group Box Protein TOX 3 4, KIAA0808 4, TOX1 3.

[0345] In some embodiments of any of the compositions, methods or uses, disclosed herein, a TOX2 protein comprises an amino acid sequence having at least 80%, 85%, 90%, 95%, 96%, 97%, 98%, or 99% sequence identity to the amino acid sequence of SEQ ID NO: 2008. In some embodiments, the TOX2 protein comprises the amino acid sequence of SEQ ID NO: 2008.

[0346] In some embodiments of any of the compositions, methods, or uses, disclosed herein, the TOX2 protein is encoded by a nucleotide sequence having at least 80%, 85%, 90%, 95%, 96%, 97%, 98%, or 99% sequence identity to the nucleotide sequence of SEQ ID NO: 2009. In some embodiments, the TOX2 protein is encoded by the nucleotide sequence of SEQ ID NO: 2009.

[0347] In some embodiments, an immune effector cell described herein, e.g., a CAR-expressing immune effector cell, comprises a nucleic acid sequence, e.g., a transgene, comprising the sequence of SEQ ID NO: 2009.

| Amino acid: NP_055544.1 | |
|---|---|
| (SEQ ID NO: 2008) | |
| 1 | mdvrfypppa qpaaapdapc lgpspcldpy ycnkfdgenm ymsmtepsqd yvpasqsypg |
| 61 | pslesedfni ppitppslpd hslvhlneve sgyhslchpm nhngllpfhp qnmdlpeitv |
| 121 | snmlgqdgtl lsnsisvmpd irnpegtqys shpqmaamrp rgqpadirqq pgmmphgqlt |
| 181 | tinqsqlsaq lglnmggsnv phnspsppgs ksatpspsss vhedegddts kinggekrpa |
| 241 | sdmgkkpktp kkkkkkdpne pqkpvsayal ffrdtqaaik gqnpnatfge vskivasmwd |
| 301 | glgeeqkqvy kkkteaakke ylkqlaayra slvsksysep vdvktsqppq linskpsvfh |
| 361 | gpsqahsaly lsshyhqqpg mnphltamhp slprniapkp nnqmpvtvsi anmayspppp |
| 421 | lqispplhqh lnmqqhqplt mqqplgnqlp mqvqsalhsp tmqqgftlqp dyqtiinpts |
| 481 | taaqvvtqam eyvrsgcrnp ppqpvdwnnd ycssggmqrd kalylt |
| Coding sequence: NM_014729.3 | |
| (SEQ ID NO: 2009) | |
| 1 | ctcttcttct taaacaaacc acaaacggat gtgagggaag gaaggtgttt cttttactcc |
| 61 | tgagcccaga cacctcactc tgttccgtct aagcttgttt tgctgaacac ttttttttaa |
| 121 | aaaaggaaaa agaaaaggag ttgcttgatg tgagagtgaa atggacgtaa gattttatcc |
| 181 | acctccagcc cagcccgccg ctgcgcccga cgctccctgt ctgggacctt ctccctgcct |
| 241 | ggacccctac tattgcaaca agtttgacgg tgagaacatg tatatgagca tgacagagcc |
| 301 | gagccaggac tatgtgccag ccagccagtc ctaccctggt ccaagcctgg aaagtgaaga |
| 361 | cttcaacatt ccaccaatta ctcctccttc cctcccagac cactcgctgg tgcacctgaa |
| 421 | tgaagttgag tctggttacc attctctgtg tcaccccatg aaccataatg gcctgctacc |
| 481 | atttcatcca caaaacatgg acctccctga aatcacagtc tccaatatgc tgggccagga |
| 541 | tggaacactg ctttctaatt ccatttctgt gatgccagat atacgaaacc cagaaggaac |
| 601 | tcagtacagt tcccatcctc agatggcagc catgagacca aggggccagc ctgcagacat |
| 661 | caggcagcag ccaggaatga tgccacatgg ccagctgact accattaacc agtcacagct |
| 721 | aagtgctcaa cttggtttga atatgggagg aagcaatgtt ccccacaact caccatctcc |
| 781 | acctggaagc aagtctgcaa ctccttcacc atccagttca gtgcatgaag atgaaggcga |
| 841 | tgatacctct aagatcaatg gtggagagaa gcggcctgcc tctgatatgg ggaaaaaacc |
| 901 | aaaaactccc aaaaagaaga agaagaagga tcccaatgag ccccagaagc ctgtgtctgc |
| 961 | ctatgcgtta ttctttcgtg atactcaggc cgccatcaag ggccaaaatc caaacgctac |
| 1021 | ctttggcgaa gtctctaaaa ttgtggcttc aatgtgggac ggtttaggag aagagcaaaa |
| 1081 | acaggtctat aaaaagaaaa ccgaggctgc gaagaaggag tacctgaagc aactcgcagc |
| 1141 | atacagagcc agccttgtat ccaagagcta cagtgaacct gttgacgtga agacatctca |
| 1201 | acctcctcag ctgatcaatt cgaagccgtc ggtgttccat gggcccagcc aggcccactc |
| 1261 | ggccctgtac ctaagttccc actatcacca acaaccggga atgaatcctc acctaactgc |
| 1321 | catgcatcct agtctcccca ggaacatagc ccccaagccg aataaccaaa tgccagtgac |
| 1381 | tgtctctata gcaaacatgg ctgtgtcccc tcctcctccc ctccagatca gcccgcctct |
| 1441 | tcaccagcat ctcaacatgc agcagcacca gccgctcacc atgcagcagc cccttgggaa |
| 1501 | ccagctcccc atgcaggtcc agtctgcctt acactcaccc accatgcagc aaggatttac |
| 1561 | tcttcaaccc gactatcaga ctattatcaa tcctacatct acagctgcac aagttgtcac |
| 1621 | ccaggcaatg gagtatgtgc gttcggggtg cagaaatcct cccccacaac cggtggactg |
| 1681 | gaataacgac tactgcagta gtgggggcat gcagagggac aaagcactgt accttacttg |
| 1741 | agaatctgaa cacctcttct ttccactgag gaattcaggg aagtgttttc accatggatt |
| 1801 | gctttgtaca gtcaaggcag ttctccattt tattagaaaa tacaagttgc taagcactta |
| 1861 | ggaccatttg agcttgtggg tcacccactc tggaagaaat agtcatgctt ctttattatt |
| 1921 | tttttaatcc tttatggaca ttgtttttct tcttccctga aggaaatttg gaccattcag |
| 1981 | attttatgtt ggttttttgc tgtgaagtgc tgcgctctag taactgcctt agcaactgta |
| 2041 | gatgtctcgg ataaaagtcc tggattttcc attggttttc ataatgggtg tttatatgaa |
| 2101 | actactaaag actttttaaa tggcttgatg tagcagtcat agcaagtttg taaatagcat |
| 2161 | ctatgttaca ctctcctaga gtataaaatg tgaatgtttt tgtagctaaa ttgtaattga |
| 2221 | aactggctca ttccagttta ttgatttcac aataggggtt aaattggcaa acattcatat |
| 2281 | ttttacttca tttttaaaac aactgactga tagttctata ttttcaaaat atttgaaaat |
| 2341 | aaaaagtatt cccaagtgat tttaatttaa aaacaaattg gctttgtctc attgatcaga |
| 2401 | caaaaagaaa ctagtattaa gggaagcgca aacacattta ttttgtactg cagaaaaatt |
| 2461 | gcttttttgt atcacttttt gtgtaatggt tagtaaatgt catttaagtc cttttatgta |
| 2521 | taaaactgcc aaatgcttac ctggtatttt attagatgca gaaacagatt ggaaacagct |
| 2581 | aaattacaac ttttacatat ggctctgtct tattgtttct tcatactgtg tctgtattta |
| 2641 | atcttttttt atggaacctg ttgcgcctat ttatgaaata ataaatatag gtgtttgtaa |
| 2701 | gtaaatttgt tagtatttga aagaggtttc tttgatgttt taacttttgc tggcaaaaaa |
| 2761 | aaattcacgc ttggtgtgaa tactttatta tttagttttt acagtaacat gaataaagcc |
| 2821 | aaacctgctt ttcatttagc agcaaattaa agtaaccagt ccttatttct gcatttcttt |
| 2881 | ggttgatgca aacaaaaaac tattatattt aagaacttta tttcttcata cgacataaca |
| 2941 | gaattgccct ccaagtcaca caagctccaa gactaaacaa acagacaggt cctctgtctt |
| 3001 | aaaaaggtta cttcttggtt ctcagctggt tctagtcaat tctgaaccac caccccccgc |
| 3061 | cccccgcaaa aaagtaaaag tcaaaccaaa cttcctcaag ctgcatgctt ttcacaaaat |
| 3121 | ccagaaagca tttaagaatt gaactagggg ctggaagaag tgaaagggaa gcatctaaaa |
| 3181 | atgaaaggtg agtaaccaga tagcaaaaga aaagggaaag ccatccaaat ttgaaagctg |
| 3241 | ttgatagaaa ttgagattct tgctgtcttt tgtgcctcta caagctacta ctcattccag |
| 3301 | aattcctggg tcttccaaga ggattcttaa ggtaccagag atttgctagg gaaccaaaag |
| 3361 | tgcttgagaa tctgcctgag ggcttgcata gctttcacat taaaaaaaga aaaagctagc |
| 3421 | agatttactc ctttttaggg gatcatatca agaaagttag tctggttgga aaccaagaga |
| 3481 | atggctgatg tctctttctt ggaatatgtg aaataaattt agcagtttaa ctaaatacaa |
| 3541 | atatatgcat tgtgtaatcc actcagaatt aaacagacaa aaggtatgct tgctttggaa |
| 3601 | tgattttagg cattgtacaa ccttgaatca cttgagcatg taataactaa taaataatgc |
| 3661 | agatccatgt gattattaaa atgactgtag ctgagagctc taattttcct gtcttgaaac |
| 3721 | tgtataagaa ctcatgtgat taagttcaca gtttattgtt tgtctgttta gtattttaga |
| 3781 | aatataccag cactactaat taactaatgt cttttattta ttatattatg ataaagtaaa |
| 3841 | aatttcactt gcattaagtc taaactgaga aggtaattac tgggaggaga atgagcagct |
| 3901 | ttgactttga caggcggttt gtgcaggaaa gcacagtgcc gtgttgttta cagcttttct |
| 3961 | agagcagctg tgcgaccagg gtagagagtg ttgaaattca ataccaaata cagtaaaaac |
| 4021 | aaatgtaaat aaaagaaaac acatcatcaa taaaactgtt attatgcgtg accgta |

### TOX3

[0348] In some embodiments, the TOX family protein is TOX3 protein, e.g., a TOX3 protein or TOX3 molecule as described herein. In some embodiments, TOX3 is also known as: CAGF9; OR TNRC9.

[0349] In some embodiments of any of the compositions, methods or uses, disclosed herein, a TOX3 protein comprises an amino acid sequence having at least 80%, 85%, 90%, 95%, 96%, 97%, 98%, or 99% sequence identity to the amino acid sequence of SEQ ID NO: 2010 or SEQ ID NO: 2012. In some embodiments, the TOX3 protein comprises the amino acid sequence of of SEQ ID NO: 2010 or SEQ ID NO: 2012.

[0350] In some embodiments of any of the compositions, methods, or uses, disclosed herein, the TOX3 protein is encoded by a nucleotide sequence having at least 80%, 85%, 90%, 95%, 96%, 97%, 98%, or 99% sequence identity to the nucleotide sequence of SEQ ID NO: 2011, or SEQ ID NO: 2013. In some embodiments, the TOX3 protein is encoded by the nucleotide sequence of SEQ ID NO: 2011, or SEQ ID NO: 2013.

[0351] In some embodiments, an immune effector cell described herein, e.g., a CAR-expressing immune effector cell, comprises a nucleic acid sequence, e.g., a transgene, comprising the sequence of SEQ ID NO: 2011, or SEQ ID NO: 2013.

| Isoform 1: | |
|---|---|
| Amino acid NP_001073899.2 | |
| (SEQ ID NO: 2010) | |
| 1 | mdvrfypaaa gdpasldfaq clgyygyskf gnnnnymnma eannaffaas eqtfhtpslg |
| 61 | deefeippit pppesdpalg mpdvllpfqa lsdplpsqgs eftpqfppqs ldlpsitisr |
| 121 | nlveqdgvlh ssglhmdqsh tqvsqyrqdp slimrsivhm tdaarsgvmp paqlttinqs |
| 181 | qlsaqlglnl ggasmphtsp sppasksatp spsssineed adeanraige kraapdsgkk |
| 241 | pktpkkkkkk dpnepqkpvs ayalffrdtq aaikgqnpna tfgevskiva smwdslgeeq |
| 301 | kqvykrktea akkeylkala ayraslvska aaesaeaqti rsvqqtlast nitsslllnt |
| 361 | plsqhgtvsa spqtlqqslp rsiapkpltm rlpmnqivts vtiaanmpsn igaplissmg |
| 421 | ttmvgsapst qvspsvqtqq hqmqlqqqqq qqqqqmqqmq qqqlqqhqmh qqiqqqmqqq |
| 481 | hfqhhmqqhl qqqqqhlqqq inqqqlqqql qqrlqlqqlq hmqhqsqpsp rqhspvasqi |
| 541 | tspipaigsp qpasqqhqsq iqsqtqtqvl sqvsif |
| Coding sequence: NM_001080430.4 | |
| (SEQ ID NO: 2012) | |
| 1 | gtctccgcgg ctcgtctcct cagtccgccc ggggaggagg aggaggagcg gggccagccg |
| 61 | ccgccgccgc cgccgtccca gcctcgccca gcgcacctga actcgcctcg ccgacccggg |
| 121 | ccccagcgcc gcgccccgcg cccccggcgc ccggcccgcg cgcagcgctg cctcggtgcc |
| 181 | ccggcggggc gcgtcccccc ggccgcctcc cgctctcccg cggctcgcgt ggccgcgcct |
| 241 | ttgtgtgcgg cggccgcggc tcccgagctc ctcgggctct gggtcccggc gcccctccgg |
| 301 | ccgcgagtcc cacgcgccac ccccgggcgc cctcgacggt ggatctagcg gcggcgagga |
| 361 | ggcgggtccc ggccccggcg aaccccagtc ccggcccccg gccccgggcc cagcttcggc |
| 421 | atggatgtga ggttctaccc cgcggcggcc ggggaccctg ccagcctgga cttcgcgcag |
| 481 | tgcctggggt actacggcta cagcaagttt ggaaataata ataactatat gaatatggct |
| 541 | gaggcgaaca atgcgttctt cgctgccagt gagcagacat tccacacacc aagccttggg |
| 601 | gacgaggaat tcgaaattcc accaatcacg cctcctccag agtcagaccc tgccctaggc |
| 661 | atgccggatg tactgctacc ctttcaagcc ctcagcgatc cattgccttc ccagggaagt |
| 721 | gaattcacac cccagtttcc ccctcaaagc ctggacctcc cttccattac aatctcaaga |
| 781 | aatctcgtgg aacaagatgg cgtgcttcat agcagtgggt tgcatatgga tcagagccac |
| 841 | acacaagtgt cccagtaccg gcaggatccc tccctgatca tgcggtccat cgtccacatg |
| 901 | accgatgctg cgcgttctgg ggtcatgcct cctgcccagc tcaccaccat caaccagtct |
| 961 | cagctcagcg cccagttggg gttgaatttg ggaggtgcca gtatgcctca cacatctcct |
| 1021 | tcacctccag caagcaaatc agccactccc tccccttcca gctccatcaa tgaagaggat |
| 1081 | gctgatgaag ccaacagagc cattggagag aaaagagctg ctccagactc tggcaagaag |
| 1141 | cccaagactc caaagaaaaa gaaaaagaaa gatcccaatg agccacagaa gccagtgtca |
| 1201 | gcatatgccc tgtttttcag agacacacag gctgcaatta aaggtcaaaa ccccaatgca |
| 1261 | acctttggag aggtctcaaa aattgtagca tctatgtggg acagccttgg agaagaacaa |
| 1321 | aagcaggtat ataaaaggaa aacagaagct gccaaaaaag aatacctgaa ggccctggcg |
| 1381 | gcatacaggg ccagcctcgt ttctaaggct gctgctgagt cagcagaagc ccagaccatc |
| 1441 | cgttctgttc agcagaccct ggcgtcgacc aatctaacat cctctctcct tctcaacact |
| 1501 | ccactgtctc aacatggaac agtgtcagca tcacctcaga ctctccagca atccctccct |
| 1561 | aggtcaatcg ctcccaaacc cttaaccatg agactcccca tgaaccagat tgtcacatca |
| 1621 | gtcaccattg cagccaacat gccctcgaac attggggctc cactgataag ctccatggga |
| 1681 | acgaccatgg ttggctcagc accctccacc caagtgagtc cttcggtgca aacccagcag |
| 1741 | catcagatgc aattgcagca gcagcagcag cagcaacaac aacagatgca acagatgcag |
| 1801 | cagcagcaac tccagcagca ccaaatgcat cagcaaatcc agcagcagat gcagcagcag |
| 1861 | catttccagc accacatgca gcagcacctg cagcagcagc agcagcatct ccagcagcaa |
| 1921 | attaatcaac agcagctgca gcagcagctg cagcagcgcc tccagctgca gcagctgcaa |
| 1981 | cacatgcagc accagtctca gccttctcct cggcagcact cccctgtcgc ctctcagata |
| 2041 | acatccccca tccctgccat cgggagcccc cagccagcct ctcagcagca ccagtcgcaa |
| 2101 | atacagtctc agacacagac tcaagtatta tcgcaggtca gtattttctg aagacgcata |
| 2161 | tggcagacgg atttgcgtat accaaggaga gtggcatagg agggaaaagc atatgtggct |
| 2221 | gaaacctgta agttggtgtt ggttatgcag aaatgtgtaa cagatcaaac ggtcctctca |
| 2281 | agtgtctatt agataggcaa taagaactgc agtgtagctg agtaacatct tttagctgac |
| 2341 | tataaatcac tttgttttta aacaagaaaa gctgtgctct tttatgtgat gcctttttta |
| 2401 | tttattcagg ctatacctac aatatgtgaa tcaaactgtt taatgaatcc tgggacatac |
| 2461 | tgatgactat aaactggcct ctctgagtca tagaaaaatg gccttatttc tccagaagtg |
| 2521 | agtaaaccac acttccaggc tatctgaact cctgaagccc taaaaataaa aagcacagtt |
| 2581 | gtaactacct gaaatatgaa gatccagttt catacaaaca tttgtatgac gtgaatagtt |
| 2641 | gatggcattt ttttgtcatg aaaaaaataa tgtaaatcac agacttttgc caaagctctt |
| 2701 | attttttttc ctaaatctct ccagaaaaaa aatgcaagtg actaaattca attattgact |
| 2761 | aatttccact ttttatccat gacttctcca aatcaaacca cagtatatgt tgtaacaata |
| 2821 | tctatgacca ctgttagccc attatattca ttccaattag aagaaatgtg aatactatat |
| 2881 | tccgtgtttt gagtgacaag tttcgaaaaa taaaaacact gtatttttaa aagggaaatg |
| 2941 | cacttaaatg aaaacagtta ttacaaaagt taagatttaa aaagaaaaag caagagtttt |
| 3001 | tattatgatg taataccagt agaatattta aaaggcacac cacatctgaa taatcaatgt |
| 3061 | aaatattttc tttcaaagtt gtaagttttc atatcatgtg ctgtaaagtt ttcctaaatg |
| 3121 | aggctttaac gtaaacactg gtgacataaa ccattcattg ctacgttgct tattgtgttt |
| 3181 | ttatgctgtt ttatactttt ttatgagtta tgatagcagc aattaagttg tttgtatttt |
| 3241 | gcttaactaa aacaaaaatg cttttatctt gctatagaat aaacacattt cagtaaaaac |
| 3301 | tgtggactgt attttgatgc aacaacaaag aaactgttca cttttcaaat aaaatgatat |
| 3361 | gtcagatttc atttttggtt ccttgaatac atgtaagatg gggaaatatg ccacatacca |
| 3421 | agtttcgttt tagcccaaac atcatcttcc atttttcaat tggaaatatg atatttatgg |
| 3481 | ccaagaatat gcattgcata gcctgaaatg aagatccttg aaaaaaccaa aacaacgcat |
| 3541 | tggaaatatt tgtgtaattg tctttttttt tttttttttt ttttttaaga tgcaagtaca |
| 3601 | aggtaagtat agagaaaaaa gtaatcgctt ttttgagggg gctagaacta gctgggtatt |
| 3661 | gtaatgttat tgcgattaaa atagatggtg aatgctaatt cttaagccaa aataattatt |
| 3721 | tcggtgccca tttattcccc ccttttcttg ctctgtagcg gttcctcttt gagagcagtg |
| 3781 | tgaccactat ccccagttgt cttgcatgat taattacagc atctgtcctg tcagaagcta |
| 3841 | taatgaagag gtcttgataa aaattgcaaa ttaccactgg caacagtctt aaactgctta |
| 3901 | tgataaaatg aaaattaaaa acagcaagtg tcaaccctga ccagaatcct aatctggaaa |
| 3961 | gaatgagggt gtgcgtggtg cgctccacag ctactatgtg caagacattc aaaaataatg |
| 4021 | gaatatggat ccctcaaagt tgttgtattt cagagattat ttactgtatg ttgtgggtta |
| 4081 | tgaataatga attcagcttt caatatttca taatcctctc ctactctgta ttatgtacaa |
| 4141 | atattgaaca gcaagagatt ctaattataa atttatggat ttcttgctgt agaaaaattt |
| 4201 | atgtctaaat tgaagctttt cataagatgt attagttgac aggtatcagt gttcaaacag |
| 4261 | ccttagaatg atgcctaatt acatctacaa gggagtgatt gtattccaca aagaaatgat |
| 4321 | gtgctagcat cagatccttc agaagtagag ctcgaatggt aaaagatttt ctgtgaattg |
| 4381 | aaactaacat tacataacaa taaccatttt atattctgtt gtgaaacctt tagacagatg |
| 4441 | tcttcaaaat taattgctaa actacatgtg acagtaattg tgtattagtt ctgtaattgt |
| 4501 | cattttgaaa acccatgaag tattgcttgg aaaaaaatgt cactagtgat aagacttaat |
| 4561 | tgcaagtgaa gtctgttttc aactgtttgc agttagaagc aggtgttgta acatctatta |
| 4621 | aatgatttta taaatcttgg gttttatcac atttgattaa atgctgctaa gccactgatg |
| 4681 | gtcaattcca gaggaaaaaa aaagtttaat gactacagtt tataaaatta atcaccaggc |
| 4741 | aaaactacat atttaaaatg tcaaaaggct tgaatcatga aaagaattcc tcaaccttgt |
| 4801 | taccaaatta ttgttttcag gattcacaaa gcatgttata tatccattta tatttcagtt |
| 4861 | tatacatatg actggtttct attcctgaga cttaagtaag tacttggtgc gctttttctt |
| 4921 | ttgttacagg tcagaaataa atcaggataa tgaaaaata |
| Isoform 2: | |
| Amino acid: NP_001139660.1 | |
| (SEQ ID NO: 2011) | |
| 1 | mkcqprsgar rieerlhyli ttylkfgnnn nymnmaeann affaasetfh tpslgdeefe |
| 61 | ippitpppes dpalgmpdvl lpfgalsdpl psqgseftpq fppqsldlps itisrnlveq |
| 121 | dgvlhssglh mdqshtqvsq yrqdpslimr sivhmtdaar sgvmppaqlt tinqsqlsaq |
| 181 | lglnlggasm phtspsppas ksatpspsss ineedadean raigekraap dsgkkpktpk |
| 241 | kkkkkdpnep qkpvsayalf frdtqaaikg qnpnatfgev skivasmwds lgeeqkqvyk |
| 301 | rkteaakkey lkalaayras lvskaaaesa eaqtirsvqq tlastnitss lllntplsqh |
| 361 | gtvsaspqtl qqslprsiap kpltmrlpmn qivtsvtiaa nmpsnigapl issmgttmvg |
| 421 | sapstqvsps vqtqqhqmql qqqqqqqqqq mqqmqqqqlq qhqmhqqiqq qmqqqhfqhh |
| 481 | mqqhlqqqqq hlqqqinqqq lqqqlqqrlq lqqlqhmqhq sqpsprqhsp vasqitspip |
| 541 | aigspqpasq qhqsqiqsqt qtqvlsqvsi f |
| Coding sequence: NM_001146188.2 | |
| (SEQ ID NO: 2013) | |
| 1 | gaaccgacac gaggcttcac ctgggaagct tcaagtctgc ctacctgtga aaggtcaggc |
| 61 | cccaacaccc cttctgggaa atcctacagc taggatgcat ttctctcact gaaccccatc |
| 121 | cagcagagga cagaagagtc agaagagggt agagaggatt tagatactca tagaagatgt |
| 181 | agtggaggat gaagtgccaa cctcgctcgg gagccaggcg cattgaggag agacttcatt |
| 241 | acctgataac tacctatctg aaatttggaa ataataataa ctatatgaat atggctgagg |
| 301 | cgaacaatgc gttcttcgct gccagtgaga cattccacac accaagcctt ggggacgagg |
| 361 | aattcgaaat tccaccaatc acgcctcctc cagagtcaga ccctgcccta ggcatgccgg |
| 421 | atgtactgct accctttcaa gccctcagcg atccattgcc ttcccaggga agtgaattca |
| 481 | caccccagtt tccccctcaa agcctggacc tcccttccat tacaatctca agaaatctcg |
| 541 | tggaacaaga tggcgtgctt catagcagtg ggttgcatat ggatcagagc cacacacaag |
| 601 | tgtcccagta ccggcaggat ccctccctga tcatgcggtc catcgtccac atgaccgatg |
| 661 | ctgcgcgttc tggggtcatg cctcctgccc agctcaccac catcaaccag tctcagctca |
| 721 | gcgcccagtt ggggttgaat ttgggaggtg ccagtatgcc tcacacatct ccttcacctc |
| 781 | cagcaagcaa atcagccact ccctcccctt ccagctccat caatgaagag gatgctgatg |
| 841 | aagccaacag agccattgga gagaaaagag ctgctccaga ctctggcaag aagcccaaga |
| 901 | ctccaaagaa aaagaaaaag aaagatccca atgagccaca gaagccagtg tcagcatatg |
| 961 | ccctgttttt cagagacaca caggctgcaa ttaaaggtca aaaccccaat gcaacctttg |
| 1021 | gagaggtctc aaaaattgta gcatctatgt gggacagcct tggagaagaa caaaagcagg |
| 1081 | tatataaaag gaaaacagaa gctgccaaaa aagaatacct gaaggccctg gcggcataca |
| 1141 | gggccagcct cgtttctaag gctgctgctg agtcagcaga agcccagacc atccgttctg |
| 1201 | ttcagcagac cctggcgtcg accaatctaa catcctctct ccttctcaac actccactgt |
| 1261 | ctcaacatgg aacagtgtca gcatcacctc agactctcca gcaatccctc cctaggtcaa |
| 1321 | tcgctcccaa acccttaacc atgagactcc ccatgaacca gattgtcaca tcagtcacca |
| 1381 | ttgcagccaa catgccctcg aacattgggg ctccactgat aagctccatg ggaacgacca |
| 1441 | tggttggctc agcaccctcc acccaagtga gtccttcggt gcaaacccag cagcatcaga |
| 1501 | tgcaattgca gcagcagcag cagcagcaac aacaacagat gcaacagatg cagcagcagc |
| 1561 | aactccagca gcaccaaatg catcagcaaa tccagcagca gatgcagcag cagcatttcc |
| 1621 | agcaccacat gcagcagcac ctgcagcagc agcagcagca tctccagcag caaattaatc |
| 1681 | aacagcagct gcagcagcag ctgcagcagc gcctccagct gcagcagctg caacacatgc |
| 1741 | agcaccagtc tcagccttct cctcggcagc actcccctgt cgcctctcag ataacatccc |
| 1801 | ccatccctgc catcgggagc ccccagccag cctctcagca gcaccagtcg caaatacagt |
| 1861 | ctcagacaca gactcaagta ttatcgcagg tcagtatttt ctgaagacgc atatggcaga |
| 1921 | cggatttgcg tataccaagg agagtggcat aggagggaaa agcatatgtg gctgaaacct |
| 1981 | gtaagttggt gttggttatg cagaaatgtg taacagatca aacggtcctc tcaagtgtct |
| 2041 | attagatagg caataagaac tgcagtgtag ctgagtaaca tcttttagct gactataaat |
| 2101 | cactttgttt ttaaacaaga aaagctgtgc tcttttatgt gatgcctttt ttatttattc |
| 2161 | aggctatacc tacaatatgt gaatcaaact gtttaatgaa tcctgggaca tactgatgac |
| 2221 | tataaactgg cctctctgag tcatagaaaa atggccttat ttctccagaa gtgagtaaac |
| 2281 | cacacttcca ggctatctga actcctgaag ccctaaaaat aaaaagcaca gttgtaacta |
| 2341 | cctgaaatat gaagatccag tttcatacaa acatttgtat gacgtgaata gttgatggca |
| 2401 | tttttttgtc atgaaaaaaa taatgtaaat cacagacttt tgccaaagct cttatttttt |
| 2461 | ttcctaaatc tctccagaaa aaaaatgcaa gtgactaaat tcaattattg actaatttcc |
| 2521 | actttttatc catgacttct ccaaatcaaa ccacagtata tgttgtaaca atatctatga |
| 2581 | ccactgttag cccattatat tcattccaat tagaagaaat gtgaatacta tattccgtgt |
| 2641 | tttgagtgac aagtttcgaa aaataaaaac actgtatttt taaaagggaa atgcacttaa |
| 2701 | atgaaaacag ttattacaaa agttaagatt taaaaagaaa aagcaagagt ttttattatg |
| 2761 | atgtaatacc agtagaatat ttaaaaggca caccacatct gaataatcaa tgtaaatatt |
| 2821 | ttctttcaaa gttgtaagtt ttcatatcat gtgctgtaaa gttttcctaa atgaggcttt |
| 2881 | aacgtaaaca ctggtgacat aaaccattca ttgctacgtt gcttattgtg tttttatgct |
| 2941 | gttttatact tttttatgag ttatgatagc agcaattaag ttgtttgtat tttgcttaac |
| 3001 | taaaacaaaa atgcttttat cttgctatag aataaacaca tttcagtaaa aactgtggac |
| 3061 | tgtattttga tgcaacaaca aagaaactgt tcacttttca aataaaatga tatgtcagat |
| 3121 | ttcatttttg gttccttgaa tacatgtaag atggggaaat atgccacata ccaagtttcg |
| 3181 | ttttagccca aacatcatct tccatttttc aattggaaat atgatattta tggccaagaa |
| 3241 | tatgcattgc atagcctgaa atgaagatcc ttgaaaaaac caaaacaacg cattggaaat |
| 3301 | atttgtgtaa ttgtcttttt tttttttttt ttttttttta agatgcaagt acaaggtaag |
| 3361 | tatagagaaa aaagtaatcg cttttttgag ggggctagaa ctagctgggt attgtaatgt |
| 3421 | tattgcgatt aaaatagatg gtgaatgcta attcttaagc caaaataatt atttcggtgc |
| 3481 | ccatttattc cccccttttc ttgctctgta gcggttcctc tttgagagca gtgtgaccac |
| 3541 | tatccccagt tgtcttgcat gattaattac agcatctgtc ctgtcagaag ctataatgaa |
| 3601 | gaggtcttga taaaaattgc aaattaccac tggcaacagt cttaaactgc ttatgataaa |
| 3661 | atgaaaatta aaaacagcaa gtgtcaaccc tgaccagaat cctaatctgg aaagaatgag |
| 3721 | ggtgtgcgtg gtgcgctcca cagctactat gtgcaagaca ttcaaaaata atggaatatg |
| 3781 | gatccctcaa agttgttgta tttcagagat tatttactgt atgttgtggg ttatgaataa |
| 3841 | tgaattcagc tttcaatatt tcataatcct ctcctactct gtattatgta caaatattga |
| 3901 | acagcaagag attctaatta taaatttatg gatttcttgc tgtagaaaaa tttatgtcta |
| 3961 | aattgaagct tttcataaga tgtattagtt gacaggtatc agtgttcaaa cagccttaga |
| 4021 | atgatgccta attacatcta caagggagtg attgtattcc acaaagaaat gatgtgctag |
| 4081 | catcagatcc ttcagaagta gagctcgaat ggtaaaagat tttctgtgaa ttgaaactaa |
| 4141 | cattacataa caataaccat tttatattct gttgtgaaac ctttagacag atgtcttcaa |
| 4201 | aattaattgc taaactacat gtgacagtaa ttgtgtatta gttctgtaat tgtcattttg |
| 4261 | aaaacccatg aagtattgct tggaaaaaaa tgtcactagt gataagactt aattgcaagt |
| 4321 | gaagtctgtt ttcaactgtt tgcagttaga agcaggtgtt gtaacatcta ttaaatgatt |
| 4381 | ttataaatct tgggttttat cacatttgat taaatgctgc taagccactg atggtcaatt |
| 4441 | ccagaggaaa aaaaaagttt aatgactaca gtttataaaa ttaatcacca ggcaaaacta |
| 4501 | catatttaaa atgtcaaaag gcttgaatca tgaaaagaat tcctcaacct tgttaccaaa |
| 4561 | ttattgtttt caggattcac aaagcatgtt atatatccat ttatatttca gtttatacat |
| 4621 | atgactggtt tctattcctg agacttaagt aagtacttgg tgcgcttttt cttttgttac |
| 4681 | aggtcagaaa taaatcagga taatgaaaaa tag |

### TOX4

[0352] In some embodiments, the TOX family protein is TOX4 protein, e.g., a TOX4 protein or TOX4 molecule as described herein. In some embodiments, TOX4 is also known as: LCP1; MIG7; C14orf92; or KIAA0737.

[0353] In some embodiments of any of the compositions, methods or uses, disclosed herein, a TOX4 protein comprises an amino acid sequence having at least 80%, 85%, 90%, 95%, 96%, 97%, 98%, or 99% sequence identity to the amino acid sequence of SEQ ID NO: 2014, or SEQ ID NO: 2016. In some embodiments, the TOX4 molecule comprises the amino acid sequence of SEQ ID NO: 2014 or SEQ ID NO: 2016.

[0354] In some embodiments of any of the compositions, methods, or uses, disclosed herein, the TOX4 protein is encoded by a nucleotide sequence having at least 80%, 85%, 90%, 95%, 96%, 97%, 98%, or 99% sequence identity to the nucleotide sequence of SEQ ID NO: 2015 or SEQ ID NO: 2017. In some embodiments, the TOX4 protein is encoded by the nucleotide sequence of SEQ ID NO: 2015 or SEQ ID NO: 2017.

[0355] In some embodiments, an immune effector cell described herein, e.g., a CAR-expressing immune effector cell, comprises a nucleic acid sequence, e.g., a transgene, comprising the sequence of SEQ ID NO: 2015 or SEQ ID NO: 2017.

| Isoform 1: | |
|---|---|
| Amino acid: NP_001290452.1 | |
| (SEQ ID NO: 2014) | |
| 1 | metfhtpslg deefeippis ldsdpslays dvvghfddla dpsssqdgsf saqygvqtld |
| 61 | mpvgmthglm eqgggllsgg ltmdldhsig tqysanppvt idvpmtdmts glmghsqltt |
| 121 | idqselssql glslgggtil ppaqspedrl sttpsptssl hedgvedfrr qlpsqktvvv |
| 181 | eagkkqkapk krkkkdpnep qkpvsayalf frdtqaaikg qnpnatfgev skivasmwds |
| 241 | lgeeqkqvyk rkteaakkey lkalaaykdn qecqatvetv eldpappsqt pspppmatvd |
| 301 | paspapasie ppalspsivv nstlssyvan qassgaggqp nitkliitkq mlpssitmsq |
| 361 | ggmvtvipat vvtsrglqlg qtstatiqps qqaqivtrsv lqaaaaaaaa asmqlppprl |
| 421 | qppplqqmpq pptqqqvtil qqppplqamq qpppqkvrin lqqqppplqi ksvplptlkm |
| 481 | qttlvpptve ssperpmnns peahtveaps peticemitd vvpevespsq mdvelvsgsp |
| 541 | valspqprcv rsgcenppiv skdwdneycs necvvkhcrd vflawvasrn sntvvfvk |
| Coding sequence: NM_001303523.1 | |
| (SEQ ID NO: 2016) | |
| 1 | agcagagaga acacacgtcc ttgcggaagt gacggcagtt ccgagtccag tgggggcggt |
| 61 | gggagcgatg agggtctgag acggtgggag cggttgtgtg aagatggaga cattccatac |
| 121 | accaagcttg ggtgatgagg aatttgaaat cccacctatc tccttggatt ctgatccctc |
| 181 | attggctgtc tcagatgtgg ttggccactt tgatgacctg gcagaccctt cctcttcaca |
| 241 | ggatggcagt ttttcagccc agtatggggt ccagacattg gacatgcctg tgggcatgac |
| 301 | ccatggcttg atggagcagg gcggggggct cctgagtggg ggcttgacca tggacttgga |
| 361 | ccactctata ggaactcagt atagtgccaa cccacctgtt acaattgatg taccaatgac |
| 421 | agacatgaca tctggcttga tggggcatag ccagttgacc accattgatc agtcagaact |
| 481 | gagttcccag ctgggtttga gcctaggggg tggcaccatc ctgccacctg cccagtcacc |
| 541 | tgaagatcgt ctttcaacca ccccttcacc tactagttca cttcacgagg atggtgttga |
| 601 | ggatttccgg aggcaacttc ccagccagaa gacagtcgtg gtggaagcag ggaaaaagca |
| 661 | gaaggcccca aagaagagaa aaaagaaaga tcctaatgaa cctcagaaac cagtttcagc |
| 721 | atatgcttta ttctttcgtg atacacaggc tgccatcaag ggacagaatc ctaatgccac |
| 781 | ttttggtgag gtttcaaaaa ttgtggcctc catgtgggat agtcttggag aggagcaaaa |
| 841 | acaggtatat aagaggaaaa ctgaggctgc caagaaagag tatctgaagg cactggctgc |
| 901 | ttacaaagac aaccaggagt gtcaggccac tgtggaaaca gtggaattgg atccagcacc |
| 961 | accatcacaa actccttctc cacctcctat ggctactgtt gacccagcat ctccagcacc |
| 1021 | agcttcaata gagccccctg ccctgtcccc atccattgtt gttaactcca ccctttcatc |
| 1081 | ctatgtggca aaccaggcat cttctggagc tgggggtcag cccaatatca ccaagttgat |
| 1141 | tattaccaaa caaatgttgc cctcttctat tactatgtct caaggaggga tggttactgt |
| 1201 | tatcccagcc acagtggtga cctcccgggg gctccaacta ggccaaacca gtacagctac |
| 1261 | tatccagccc agtcaacaag cccagattgt cactcggtca gtgttgcagg cagcagcagc |
| 1321 | tgctgctgct gctgcttcta tgcaactgcc tccaccccga ctacagcccc ctccattaca |
| 1381 | acagatgcca cagcccccga ctcagcagca agttaccatt ctgcagcagc ctcctccact |
| 1441 | ccaggccatg caacagcctc cacctcagaa agttcgaatc aatttacagc aacagcctcc |
| 1501 | tcctctgcag atcaagagtg tgcctctacc cactttgaaa atgcagacta ccttagtccc |
| 1561 | accaactgtg gaaagtagtc ctgagcggcc tatgaacaac agccctgagg cccatacagt |
| 1621 | ggaggcacct tctcctgaga ctatctgtga gatgatcaca gatgtagttc ctgaggttga |
| 1681 | gtctccttct cagatggatg ttgaattggt gagtgggtct cctgtggcac tctcacccca |
| 1741 | gcctcgatgt gtgaggtctg gttgtgagaa ccctcccatt gtgagtaagg actgggacaa |
| 1801 | tgaatactgc agcaatgagt gtgtggtgaa gcactgcagg gatgtattct tggcctgggt |
| 1861 | agcctctaga aattcaaaca cagtggtgtt tgtgaaatag tccttcctgt tctccaagcc |
| 1921 | agtgaagagt tatctgctgg gaaagtgtcc aagagcctgt ttttgaaaca caagctgggc |
| 1981 | ttctggtagt gcctcatcac aacccatgat ggctgttcat gtttcacccc ttttcttcct |
| 2041 | tcagcagagg ccaggctatg gagcagggcc actgaatttg ctgtaatctg gagatgcttt |
| 2101 | ttactttcaa ccataagcgg taatagcaga ggaaagggtg aagggagtct gggcaagcaa |
| 2161 | agcatagaga tggtggggtg gtggtggggt tgaagaaact tgttggtata attgtcatag |
| 2221 | gacttgccta aaatattatt aaaattacgg gagtgtactc agctttgagc ctaggagaaa |
| 2281 | atgccactgt gtgcatccat tttaaagggt tccctcataa aaaaatgtta ttccccatta |
| 2341 | tcacatcagt acactgcttt gaaaacaaaa cttttcaaca tgggcatact gggctacatg |
| 2401 | gaaaatgaca tcacccagga gtgatttctc tttatatata ttatttctgc agttaccatc |
| 2461 | cttatctgag ttatcacagt tcatgaatct aagaggcgga actctacatc attagtaaga |
| 2521 | ggttccacca aagtctaaag ttgtattcac ttgtgtttga tgaactatct ttaaaagacc |
| 2581 | ataggtctat cattatttct tagacataat ctaaagaaaa acagactaga gaagccacct |
| 2641 | ggttgtaaca gaataagcag aagtttacag catgatagtc caagtggtga taactttaaa |
| 2701 | taaaactcaa atttttactg tttgtagaca ggaatgctgt cctagagaac ctcctcctca |
| 2761 | accagctacg tacatagttt tatcctatgc attcctgttt tctgtgtgtt ttttgttttt |
| 2821 | tttttttttt tttttttttg agacagagtc tcgctctgtc acccaggctg gagtgcagtg |
| 2881 | gtgcgacctc agctcactga aacctctgcc tcccgggttc aagcgattct cctgcatcag |
| 2941 | cctcccgagt agctaggatt acaggcgccc gccactacgc ccagctaatt tgtggtattt |
| 3001 | ttagtagaga cagggtttca ccatgttggc caggctggtc tcgaactcct gacctcatga |
| 3061 | tccgcccgcc ttgacctccc aaagtgctgg gattacaggc atgagccacc gcacccagcc |
| 3121 | tgcattcctg tttttttaat ggttttggag ggtagcagta gagatggggt ctcactatgt |
| 3181 | tgcccagtct agtcttgaac tcctgggcta cagttaccct cctacctcgg cttcccaaag |
| 3241 | tgctcggatt acaggtgtga gccactgtgc ctagcctata atgatcattt taatgtttcc |
| 3301 | catgcactca tttagtttga accttcacag caacccaatg aggtaatact cccatttcac |
| 3361 | atataatact gagagatgag ttgcacaaga ttatacactg ttaagtagca gagccagaat |
| 3421 | ggacttcaga atcccaacta caatacaaat gtttatttaa ataaagaaga aagctattgt |
| 3481 | acaaatatca ctcttcaggt ttagcttaca gagccatggc tatggattct tagctctgta |
| 3541 | aggaagtgct tctataaatt cttaggttta gagatgatac catctgggta cctttgcttg |
| 3601 | aaccgtgcaa ccacatctgg gtctagtagg tggatcccat ccagttggtt tccaagggtg |
| 3661 | atcctgaaac agtgtaaaag gaggggcaaa ccagaaatcc tggaattaga gggtttaata |
| 3721 | ttgttaaaaa atgcatacca aatgaagact gcctatcatc atatcaaata tgccaattct |
| 3781 | aaaaagagct taacattaga atagtatatg gtagaattac tagttcagaa ttggcataga |
| 3841 | ttctggtgtt aaaatagact ggatctgtat tatctgaggg ttagtaacta atgcttagcc |
| 3901 | aggcctgctt cacagagttg ctaccaggga gtattctttg gataagcaaa atgctagcag |
| 3961 | catgtgtttt aagctctgtt aaggggtgaa agatgtaatt attgacagat taaatagata |
| 4021 | acttcgtaac caccaggggg cagattcaat acatcacaga atggctgagg aagatccttg |
| 4081 | ggttgtgaag agagtagaaa ccctagggag cagtgctttt gggtcctaga acctgttgag |
| 4141 | tttctaatga atatttgtag aatctcataa aacagtttaa atacaagctt aagtggctta |
| 4201 | tgaatcctgt gaagctcatt tatggactag tgtaaaacaa tgtgaagctc tactaagttc |
| 4261 | tgtccttaat cataaataat agccccttga ggactagcct gttctctggt caccttacca |
| 4321 | gttgggttgc acattgtgtg gtcgtccaaa taactcaatc ttgcgagtgc caggagatag |
| 4381 | tctttcaatc atgccataga tttcatctgg tttatgactg gtggaacgaa cctaggaaat |
| 4441 | aaaaactagc tgctttttaa gttacacaag aaaaaa |
| Isoform 2 | |
| Amino acid: NP_055643.1 | |
| (SEQ ID NO: 2015) | |
| 1 | mefpggndny ltitgpshpf lsgaetfhtp slgdeefeip pisldsdpsl aysdvvghfd |
| 61 | dladpsssqd gsfsaqygvq tldmpvgmth glmeqgggll sggltmdldh sigtqysanp |
| 121 | pvtidvpmtd mtsglmghsq lttidqsels sqlglslggg tilppaqspe drlsttpspt |
| 181 | sslhedgved frrqlpsqkt vvveagkkqk apkkrkkkdp nepqkpvsay alffrdtqaa |
| 241 | ikgqnpnatf gevskivasm wdslgeeqkq vykrkteaak keylkalaay kdnqecqatv |
| 301 | etveldpapp sqtpspppma tvdpaspapa sieppalsps ivvnstlssy vanqassgag |
| 361 | gqpnitklii tkqmlpssit msqggmvtvi patvvtsrgl qlgqtstati qpsqqaqivt |
| 421 | rsvlqaaaaa aaaasmqlpp prlqppplqq mpqpptqqqv tilqqppplq amqqpppqkv |
| 481 | rinlqqqppp lqiksvplpt lkmqttivpp tvessperpm nnspeahtve apspeticem |
| 541 | itdvvpeves psqmdvelvs gspvalspqp rcvrsgcenp pivskdwdne ycsnecvvkh |
| 601 | crdvflawva srnsntvvfv k |
| Coding sequence: NM_014828.4 | |
| (SEQ ID NO: 2017) | |
| 1 | cttgcggaag tgacggcagt tccgagtcca gtgggggcgg tgggagcgat gagggtctga |
| 61 | gacggtggga gcggttgtgt gaagatggag tttcccggag gaaatgacaa ttacctgacg |
| 121 | atcacagggc cttcgcaccc cttcctgtca ggggccgaga cattccatac accaagcttg |
| 181 | ggtgatgagg aatttgaaat cccacctatc tccttggatt ctgatccctc attggctgtc |
| 241 | tcagatgtgg ttggccactt tgatgacctg gcagaccctt cctcttcaca ggatggcagt |
| 301 | ttttcagccc agtatggggt ccagacattg gacatgcctg tgggcatgac ccatggcttg |
| 361 | atggagcagg gcggggggct cctgagtggg ggcttgacca tggacttgga ccactctata |
| 421 | ggaactcagt atagtgccaa cccacctgtt acaattgatg taccaatgac agacatgaca |
| 481 | tctggcttga tggggcatag ccagttgacc accattgatc agtcagaact gagttcccag |
| 541 | ctgggtttga gcctaggggg tggcaccatc ctgccacctg cccagtcacc tgaagatcgt |
| 601 | ctttcaacca ccccttcacc tactagttca cttcacgagg atggtgttga ggatttccgg |
| 661 | aggcaacttc ccagccagaa gacagtcgtg gtggaagcag ggaaaaagca gaaggcccca |
| 721 | aagaagagaa aaaagaaaga tcctaatgaa cctcagaaac cagtttcagc atatgcttta |
| 781 | ttctttcgtg atacacaggc tgccatcaag ggacagaatc ctaatgccac ttttggtgag |
| 841 | gtttcaaaaa ttgtggcctc catgtgggat agtcttggag aggagcaaaa acaggtatat |
| 901 | aagaggaaaa ctgaggctgc caagaaagag tatctgaagg cactggctgc ttacaaagac |
| 961 | aaccaggagt gtcaggccac tgtggaaaca gtggaattgg atccagcacc accatcacaa |
| 1021 | actccttctc cacctcctat ggctactgtt gacccagcat ctccagcacc agcttcaata |
| 1081 | gagccccctg ccctgtcccc atccattgtt gttaactcca ccctttcatc ctatgtggca |
| 1141 | aaccaggcat cttctggagc tgggggtcag cccaatatca ccaagttgat tattaccaaa |
| 1201 | caaatgttgc cctcttctat tactatgtct caaggaggga tggttactgt tatcccagcc |
| 1261 | acagtggtga cctcccgggg gctccaacta ggccaaacca gtacagctac tatccagccc |
| 1321 | agtcaacaag cccagattgt cactcggtca gtgttgcagg cagcagcagc tgctgctgct |
| 1381 | gctgcttcta tgcaactgcc tccaccccga ctacagcccc ctccattaca acagatgcca |
| 1441 | cagcccccga ctcagcagca agttaccatt ctgcagcagc ctcctccact ccaggccatg |
| 1501 | caacagcctc cacctcagaa agttcgaatc aatttacagc aacagcctcc tcctctgcag |
| 1561 | atcaagagtg tgcctctacc cactttgaaa atgcagacta ccttagtccc accaactgtg |
| 1621 | gaaagtagtc ctgagcggcc tatgaacaac agccctgagg cccatacagt ggaggcacct |
| 1681 | tctcctgaga ctatctgtga gatgatcaca gatgtagttc ctgaggttga gtctccttct |
| 1741 | cagatggatg ttgaattggt gagtgggtct cctgtggcac tctcacccca gcctcgatgt |
| 1801 | gtgaggtctg gttgtgagaa ccctcccatt gtgagtaagg actgggacaa tgaatactgc |
| 1861 | agcaatgagt gtgtggtgaa gcactgcagg gatgtattct tggcctgggt agcctctaga |
| 1921 | aattcaaaca cagtggtgtt tgtgaaatag tccttcctgt tctccaagcc agtgaagagt |
| 1981 | tatctgctgg gaaagtgtcc aagagcctgt ttttgaaaca caagctgggc ttctggtagt |
| 2041 | gcctcatcac aacccatgat ggctgttcat gtttcacccc ttttcttcct tcagcagagg |
| 2101 | ccaggctatg gagcagggcc actgaatttg ctgtaatctg gagatgcttt ttactttcaa |
| 2161 | ccataagcgg taatagcaga ggaaagggtg aagggagtct gggcaagcaa agcatagaga |
| 2221 | tggtggggtg gtggtggggt tgaagaaact tgttggtata attgtcatag gacttgccta |
| 2281 | aaatattatt aaaattacgg gagtgtactc agctttgagc ctaggagaaa atgccactgt |
| 2341 | gtgcatccat tttaaagggt tccctcataa aaaaatgtta ttccccatta tcacatcagt |
| 2401 | acactgcttt gaaaacaaaa cttttcaaca tgggcatact gggctacatg gaaaatgaca |
| 2461 | tcacccagga gtgatttctc tttatatata ttatttctgc agttaccatc cttatctgag |
| 2521 | ttatcacagt tcatgaatct aagaggcgga actctacatc attagtaaga ggttccacca |
| 2581 | aagtctaaag ttgtattcac ttgtgtttga tgaactatct ttaaaagacc ataggtctat |
| 2641 | cattatttct tagacataat ctaaagaaaa acagactaga gaagccacct ggttgtaaca |
| 2701 | gaataagcag aagtttacag catgatagtc caagtggtga taactttaaa taaaactcaa |
| 2761 | atttttactg tttgtagaca ggaatgctgt cctagagaac ctcctcctca accagctacg |
| 2821 | tacatagttt tatcctatgc attcctgttt tctgtgtgtt ttttgttttt tttttttttt |
| 2881 | tttttttttg agacagagtc tcgctctgtc acccaggctg gagtgcagtg gtgcgacctc |
| 2941 | agctcactga aacctctgcc tcccgggttc aagcgattct cctgcatcag cctcccgagt |
| 3001 | agctaggatt acaggcgccc gccactacgc ccagctaatt tgtggtattt ttagtagaga |
| 3061 | cagggtttca ccatgttggc caggctggtc tcgaactcct gacctcatga tccgcccgcc |
| 3121 | ttgacctccc aaagtgctgg gattacaggc atgagccacc gcacccagcc tgcattcctg |
| 3181 | tttttttaat ggttttggag ggtagcagta gagatggggt ctcactatgt tgcccagtct |
| 3241 | agtcttgaac tcctgggcta cagttaccct cctacctcgg cttcccaaag tgctcggatt |
| 3301 | acaggtgtga gccactgtgc ctagcctata atgatcattt taatgtttcc catgcactca |
| 3361 | tttagtttga accttcacag caacccaatg aggtaatact cccatttcac atataatact |
| 3421 | gagagatgag ttgcacaaga ttatacactg ttaagtagca gagccagaat ggacttcaga |
| 3481 | atcccaacta caatacaaat gtttatttaa ataaagaaga aagctattgt acaaatatca |
| 3541 | ctcttcaggt ttagcttaca gagccatggc tatggattct tagctctgta aggaagtgct |
| 3601 | tctataaatt cttaggttta gagatgatac catctgggta cctttgcttg aaccgtgcaa |
| 3661 | ccacatctgg gtctagtagg tggatcccat ccagttggtt tccaagggtg atcctgaaac |
| 3721 | agtgtaaaag gaggggcaaa ccagaaatcc tggaattaga gggtttaata ttgttaaaaa |
| 3781 | atgcatacca aatgaagact gcctatcatc atatcaaata tgccaattct aaaaagagct |
| 3841 | taacattaga atagtatatg gtagaattac tagttcagaa ttggcataga ttctggtgtt |
| 3901 | aaaatagact ggatctgtat tatctgaggg ttagtaacta atgcttagcc aggcctgctt |
| 3961 | cacagagttg ctaccaggga gtattctttg gataagcaaa atgctagcag catgtgtttt |
| 4021 | aagctctgtt aaggggtgaa agatgtaatt attgacagat taaatagata acttcgtaac |
| 4081 | caccaggggg cagattcaat acatcacaga atggctgagg aagatccttg ggttgtgaag |
| 4141 | agagtagaaa ccctagggag cagtgctttt gggtcctaga acctgttgag tttctaatga |
| 4201 | atatttgtag aatctcataa aacagtttaa atacaagctt aagtggctta tgaatcctgt |
| 4261 | gaagctcatt tatggactag tgtaaaacaa tgtgaagctc tactaagttc tgtccttaat |
| 4321 | cataaataat agccccttga ggactagcct gttctctggt caccttacca gttgggttgc |
| 4381 | acattgtgtg gtcgtccaaa taactcaatc ttgcgagtgc caggagatag tctttcaatc |
| 4441 | atgccataga tttcatctgg tttatgactg gtggaacgaa cctaggaaat aaaaactagc |
| 4501 | tgctttttaa gtta |

### Chimeric Antigen Receptor (CAR)

[0356] In some embodiments, disclosed herein are methods of using a modified immune effector cell (e.g., a population of modified immune effector cells) that expresses a CAR molecule, and has an increased level, expression, and/or activity of a TOX-family protein, e.g., TOX2, (“TOX^{hi} CAR cell”). In some embodiments, an exemplary TOX^{hi} CAR construct comprises an optional leader sequence (e.g., a leader sequence described herein), an antigen binding domain (e.g., an antigen binding domain described herein), a hinge (e.g., a hinge region described herein), a transmembrane domain (e.g., a transmembrane domain described herein), and an intracellular stimulatory domain (e.g., an intracellular stimulatory domain described herein). In some embodiments, an exemplary TOX^{hi} CAR construct comprises an optional leader sequence (e.g., a leader sequence described herein), an extracellular antigen binding domain (e.g., an antigen binding domain described herein), a hinge (e.g., a hinge region described herein), a transmembrane domain (e.g., a transmembrane domain described herein), an intracellular costimulatory signaling domain (e.g., a costimulatory signaling domain described herein) and/or an intracellular primary signaling domain (e.g., a primary signaling domain described herein).

[0357] Sequences of non-limiting examples of various components that can be part of a TOX^{hi} CAR molecule described herein, are listed in Table 1 and Table 10, where “aa” stands for amino acids, and “na” stands for nucleic acids that encode the corresponding peptide.

TABLE 1
Sequences for various components of CAR

| | | |
|---|---|---|
| SEQ | pGK | AGCTTATGGTGCCCCAACCCCAACGCGGAAAAGGTTCCGTCG |
| ID | promoter | GGACCCAAACGCGTCCCTGCGCCGACGAGACCCGCACCAAGG |
| NO: | | CCCTTTGCGTCGCCGCGGCTGGGACCCAGAGCGTGTAAGAAG |
| 13 | | TGCAGGCAAGCGTCGCAGTGGGCCTAGAAGCGGCGATGGGAA |
| | | CACCCGGGGGGCCGCTGCGAAGGACGAGGCGGGGATTCAGCC |
| | | CTTCCAAGGAACGCCAAGCGCCGCACGGCCTGCACTATTTGC |
| | | CTTCGGCGTGCAGAGTGATCATGGGAGCGTCTGCCTGTCGCG |
| | | GTCCCTCGTTACCGTCGCGCGGCTGGCGCTACCCGACACCGGT |
| | | TATCGCCGACGAGTCGTCCCGCGCGGCTCTCGTCGCCGGCCCT |
| | | TCCCCGCCACGCCCTCCGCCCCACACCCCGCCATCACACCCGG |
| | | GACAAGGACGGGCGCGCCACAAGGCGTAAGACGTTCGGAGG |
| | | CCTCGCGTGCAGCCGTCAGCCGAGGGAGCAACTGGCTTAGTG |
| | | GCTGGAGAGAGGGGT |
| SEQ | CTL019 | GACATCCAGATGACACAGACTACATCCTCCCTGTCTGCCTCTC |
| ID | scFv | TGGGAGACAGAGTCACCATCAGTTGCAGGGCAAGTCAGGACA |
| NO: | nucleotide | TTAGTAAATATTTAAATTGGTATCAGCAGAAACCAGATGGAA |
| 14 | sequence | CTGTTAAACTCCTGATCTACCATACATCAAGATTACACTCAGG |
| | | AGTCCCATCAAGGTTCAGTGGCAGTGGGTCTGGAACAGATTA |
| | | TTCTCTCACCATTAGCAACCTGGAGCAAGAAGATATTGCCACT |
| | | TACTTTTGCCAACAGGGTAATACGCTTCCGTACACGTTCGGAG |
| | | GGGGGACCAAGCTGGAGATCACAGGTGGCGGTGGCTCGGGCG |
| | | GTGGTGGGTCGGGTGGCGGCGGATCTGAGGTGAAACTGCAGG |
| | | AGTCAGGACCTGGCCTGGTGGCGCCCTCACAGAGCCTGTCCG |
| | | TCACATGCACTGTCTCAGGGGTCTCATTACCCGACTATGGTGT |
| | | AAGCTGGATTCGCCAGCCTCCACGAAAGGGTCTGGAGTGGCT |
| | | GGGAGTAATATGGGGTAGTGAAACCACATACTATAATTCAGC |
| | | TCTCAAATCCAGACTGACCATCATCAAGGACAACTCCAAGAG |
| | | CCAAGTTTTCTTAAAAATGAACAGTCTGCAAACTGATGACAC |
| | | AGCCATTTACTACTGTGCCAAACATTATTACTACGGTGGTAGC |
| | | TATGCTATGGACTACTGGGGCCAAGGAACCTCAGTCACCGTCT |
| | | CCTCA |
| SEQ | CTL019 | DIQMTQTTSSLSASLGDRVTISCRASQDISKYLNWYQQKPDGTV |
| ID | scFv amino | KLLIYHTSRLHSGVPSRFSGSGSGTDYSLTISNLEQEDIATYFCQQ |
| NO: | acid | GNTLPYTFGGGTKLEITGGGGSGGGGSGGGGSEVKLQESGPGLV |
| 15 | sequence | APSQSLSVTCTVSGVSLPDYGVSWIRQPPRKGLEWLGVIWGSETT |
| | | YYNSALKSRLTIIKDNSKSQVFLKMNSLQTDDTAIYYCAKHYYY |
| | | GGSYAMDYWGQGTSVTVSS |
| SEQ | P2A | GGAAGCGGAGCTACTAACTTCAGCCTGCTGAAGCAGGCTGGA |
| ID | nucleotide | GACGTGGAGGAGAACCCTGGACCT |
| NO: | sequence | |
| 23 | | |
| SEQ | P2A amino | GSGATNFSLLKQAGDVEENPGP |
| ID | acid | |
| NO: | sequence | |
| 24 | | |
| SEQ | CTL019 | GACATCCAGATGACACAGACTACATCCTCCCTGTCTGCCTCTC |
| ID | full-length | TGGGAGACAGAGTCACCATCAGTTGCAGGGCAAGTCAGGACA |
| NO: | nucleotide | TTAGTAAATATTTAAATTGGTATCAGCAGAAACCAGATGGAA |
| 25 | sequence | CTGTTAAACTCCTGATCTACCATACATCAAGATTACACTCAGG |
| | | AGTCCCATCAAGGTTCAGTGGCAGTGGGTCTGGAACAGATTA |
| | | TTCTCTCACCATTAGCAACCTGGAGCAAGAAGATATTGCCACT |
| | | TACTTTTGCCAACAGGGTAATACGCTTCCGTACACGTTCGGAG |
| | | GGGGGACCAAGCTGGAGATCACAGGTGGCGGTGGCTCGGGCG |
| | | GTGGTGGGTCGGGTGGCGGCGGATCTGAGGTGAAACTGCAGG |
| | | AGTCAGGACCTGGCCTGGTGGCGCCCTCACAGAGCCTGTCCG |
| | | TCACATGCACTGTCTCAGGGGTCTCATTACCCGACTATGGTGT |
| | | AAGCTGGATTCGCCAGCCTCCACGAAAGGGTCTGGAGTGGCT |
| | | GGGAGTAATATGGGGTAGTGAAACCACATACTATAATTCAGC |
| | | TCTCAAATCCAGACTGACCATCATCAAGGACAACTCCAAGAG |
| | | CCAAGTTTTCTTAAAAATGAACAGTCTGCAAACTGATGACAC |
| | | AGCCATTTACTACTGTGCCAAACATTATTACTACGGTGGTAGC |
| | | TATGCTATGGACTACTGGGGCCAAGGAACCTCAGTCACCGTCT |
| | | CCTCAACCACGACGCCAGCGCCGCGACCACCAACACCGGCGC |
| | | CCACCATCGCGTCGCAGCCCCTGTCCCTGCGCCCAGAGGCGTG |
| | | CCGGCCAGCGGCGGGGGGCGCAGTGCACACGAGGGGGCTGG |
| | | ACTTCGCCTGTGATATCTACATCTGGGCGCCCTTGGCCGGGAC |
| | | TTGTGGGGTCCTTCTCCTGTCACTGGTTATCACCCTTTACTGCA |
| | | AACGGGGCAGAAAGAAACTCCTGTATATATTCAAACAACCAT |
| | | TTATGAGACCAGTACAAACTACTCAAGAGGAAGATGGCTGTA |
| | | GCTGCCGATTTCCAGAAGAAGAAGAAGGAGGATGTGAACTGA |
| | | GAGTGAAGTTCAGCAGGAGCGCAGACGCCCCCGCGTACAAGC |
| | | AGGGCCAGAACCAGCTCTATAACGAGCTCAATCTAGGACGAA |
| | | GAGAGGAGTACGATGTTTTGGACAAGAGACGTGGCCGGGACC |
| | | CTGAGATGGGGGGAAAGCCGAGAAGGAAGAACCCTCAGGAA |
| | | GGCCTGTACAATGAACTGCAGAAAGATAAGATGGCGGAGGCC |
| | | TACAGTGAGATTGGGATGAAAGGCGAGCGCCGGAGGGGCAA |
| | | GGGGCACGATGGCCTTTACCAGGGTCTCAGTACAGCCACCAA |
| | | GGACACCTACGACGCCCTTCACATGCAGGCCCTGCCCCCTCGC |
| SEQ | CTL019 | DIQMTQTTSSLSASLGDRVTISCRASQDISKYLNWYQQKPDGTV |
| ID | full-length | KLLIYHTSRLHSGVPSRFSGSGSGTDYSLTISNLEQEDIATYFCQQ |
| NO: | amino acid | GNTLPYTFGGGTKLEITGGGGSGGGGSGGGGSEVKLQESGPGLV |
| 26 | sequence | APSQSLSVTCTVSGVSLPDYGVSWIRQPPRKGLEWLGVIWGSETT |
| | | YYNSALKSRLTIIKDNSKSQVFLKMNSLQTDDTAIYYCAKHYYY |
| | | GGSYAMDYWGQGTSVTVSSTTTPAPRPPTPAPTIASQPLSLRPEA |
| | | CRPAAGGAVHTRGLDFACDIYIWAPLAGTCGVLLLSLVITLYCK |
| | | RGRKKLLYIFKQPFMRPVQTTQEEDGCSCRFPEEEEGGCELRVKF |
| | | SRSADAPAYKQGQNQLYNELNLGRREEYDVLDKRRGRDPEMG |
| | | GKPRRKNPQEGLYNELQKDKMAEAYSEIGMKGERRRGKGHDG |
| | | LYQGLSTATKDTYDALHMQALPPR |

TABLE 10
Sequences of various components of CAR
(aa-amino acid sequence, na-nucleic acid sequence).

| SEQ ID | | |
|---|---|---|
| NO: | description | Sequence |
| SEQ ID | EF-1 | CGTGAGGCTCCGGTGCCCGTCAGTGGGCAGAGCGCACATC |
| NO: | promoter | GCCCACAGTCCCCGAGAAGTTGGGGGGAGGGGTCGGCAAT |
| 1014 | | TGAACCGGTGCCTAGAGAAGGTGGCGCGGGGTAAACTGGG |
| | | AAAGTGATGTCGTGTACTGGCTCCGCCTTTTTCCCGAGGGT |
| | | GGGGGAGAACCGTATATAAGTGCAGTAGTCGCCGTGAACG |
| | | TTCTTTTTCGCAACGGGTTTGCCGCCAGAACACAGGTAAGT |
| | | GCCGTGTGTGGTTCCCGCGGGCCTGGCCTCTTTACGGGTTA |
| | | TGGCCCTTGCGTGCCTTGAATTACTTCCACCTGGCTGCAGT |
| | | ACGTGATTCTTGATCCCGAGCTTCGGGTTGGAAGTGGGTGG |
| | | GAGAGTTCGAGGCCTTGCGCTTAAGGAGCCCCTTCGCCTCG |
| | | TGCTTGAGTTGAGGCCTGGCCTGGGCGCTGGGGCCGCCGC |
| | | GTGCGAATCTGGTGGCACCTTCGCGCCTGTCTCGCTGCTTT |
| | | CGATAAGTCTCTAGCCATTTAAAATTTTTGATGACCTGCTG |
| | | CGACGCTTTTTTTCTGGCAAGATAGTCTTGTAAATGCGGGC |
| | | CAAGATCTGCACACTGGTATTTCGGTTTTTGGGGCCGCGGG |
| | | CGGCGACGGGGCCCGTGCGTCCCAGCGCACATGTTCGGCG |
| | | AGGCGGGGCCTGCGAGCGCGGCCACCGAGAATCGGACGG |
| | | GGGTAGTCTCAAGCTGGCCGGCCTGCTCTGGTGCCTGGCCT |
| | | CGCGCCGCCGTGTATCGCCCCGCCCTGGGCGGCAAGGCTG |
| | | GCCCGGTCGGCACCAGTTGCGTGAGCGGAAAGATGGCCGC |
| | | TTCCCGGCCCTGCTGCAGGGAGCTCAAAATGGAGGACGCG |
| | | GCGCTCGGGAGAGCGGGCGGGTGAGTCACCCACACAAAGG |
| | | AAAAGGGCCTTTCCGTCCTCAGCCGTCGCTTCATGTGACTC |
| | | CACGGAGTACCGGGCGCCGTCCAGGCACCTCGATTAGTTCT |
| | | CGAGCTTTTGGAGTACGTCGTCTTTAGGTTGGGGGGAGGG |
| | | GTTTTATGCGATGGAGTTTCCCCACACTGAGTGGGTGGAGA |
| | | CTGAAGTTAGGCCAGCTTGGCACTTGATGTAATTCTCCTTG |
| | | GAATTTGCCCTTTTTGAGTTTGGATCTTGGTTCATTCTCAAG |
| | | CCTCAGACAGTGGTTCAAAGTTTTTTTCTTCCATTTCAGGTG |
| | | TCGTGA |
| SEQ ID | Leader (aa) | MALPVTALLLPLALLLHAARP |
| NO: | | |
| 1015 | | |
| SEQ ID | Leader (na) | ATGGCCCTGCCTGTGACAGCCCTGCTGCTGCCTCTGGCTCT |
| NO: | | GCTGCTGCATGCCGCTAGACCC |
| 1016 | | |
| SEQ ID | Leader (na) | ATGGCCCTCCCTGTCACCGCCCTGCTGCTTCCGCTGGCTCTT |
| NO: | | CTGCTCCACGCCGCTCGGCCC |
| 1017 | | |
| SEQ ID | CD8 hinge | TTTPAPRPPTPAPTIASQPLSLRPEACRPAAGGAVHTRGLDFAC |
| NO: | (aa) | D |
| 1018 | | |
| SEQ ID | CD8 hinge | ACCACGACGCCAGCGCCGCGACCACCAACACCGGCGCCCA |
| NO: | (na) | CCATCGCGTCGCAGCCCCTGTCCCTGCGCCCAGAGGCGTGC |
| 1019 | | CGGCCAGCGGCGGGGGGCGCAGTGCACACGAGGGGGCTG |
| | | GACTTCGCCTGTGAT |
| SEQ ID | Ig4 hinge | ESKYGPPCPPCPAPEFLGGPSVFLFPPKPKDTLMISRTPEVTCV |
| NO: | (aa) | VVDVSQEDPEVQFNWYVDGVEVHNAKTKPREEQFNSTYRVV |
| 1020 | | SVLTVLHQDWLNGKEYKCKVSNKGLPSSIEKTISKAKGQPRE |
| | | PQVYTLPPSQEEMTKNQVSLTCLVKGFYPSDIAVEWESNGQP |
| | | ENNYKTTPPVLDSDGSFFLYSRLTVDKSRWQEGNVFSCSVMH |
| | | EALHNHYTQKSLSLSLGKM |
| SEQ ID | Ig4 hinge | GAGAGCAAGTACGGCCCTCCCTGCCCCCCTTGCCCTGCCCC |
| NO: | (na) | CGAGTTCCTGGGCGGACCCAGCGTGTTCCTGTTCCCCCCCA |
| 1021 | | AGCCCAAGGACACCCTGATGATCAGCCGGACCCCCGAGGT |
| | | GACCTGTGTGGTGGTGGACGTGTCCCAGGAGGACCCCGAG |
| | | GTCCAGTTCAACTGGTACGTGGACGGCGTGGAGGTGCACA |
| | | ACGCCAAGACCAAGCCCCGGGAGGAGCAGTTCAATAGCAC |
| | | CTACCGGGTGGTGTCCGTGCTGACCGTGCTGCACCAGGACT |
| | | GGCTGAACGGCAAGGAATACAAGTGTAAGGTGTCCAACAA |
| | | GGGCCTGCCCAGCAGCATCGAGAAAACCATCAGCAAGGCC |
| | | AAGGGCCAGCCTCGGGAGCCCCAGGTGTACACCCTGCCCC |
| | | CTAGCCAAGAGGAGATGACCAAGAACCAGGTGTCCCTGAC |
| | | CTGCCTGGTGAAGGGCTTCTACCCCAGCGACATCGCCGTGG |
| | | AGTGGGAGAGCAACGGCCAGCCCGAGAACAACTACAAGA |
| | | CCACCCCCCCTGTGCTGGACAGCGACGGCAGCTTCTTCCTG |
| | | TACAGCCGGCTGACCGTGGACAAGAGCCGGTGGCAGGAGG |
| | | GCAACGTCTTTAGCTGCTCCGTGATGCACGAGGCCCTGCAC |
| | | AACCACTACACCCAGAAGAGCCTGAGCCTGTCCCTGGGCA |
| | | AGATG |
| SEQ ID | IgD hinge | RWPESPKAQASSVPTAQPQAEGSLAKATTAPATTRNTGRGGE |
| NO: | (aa) | EKKKEKEKEEQEERETKTPECPSHTQPLGVYLLTPAVQDLWL |
| 1022 | | RDKATFTCFVVGSDLKDAHLTWEVAGKVPTGGVEEGLLERH |
| | | SNGSQSQHSRLTLPRSLWNAGTSVTCTLNHPSLPPQRLMALR |
| | | EPAAQAPVKLSLNLLASSDPPEAASWLLCEVSGFSPPNILLMW |
| | | LEDQREVNTSGFAPARPPPQPGSTTFWAWSVLRVPAPPSPQPA |
| | | TYTCVVSHEDSRTLLNASRSLEVSYVTDH |
| SEQ ID | IgD hinge | AGGTGGCCCGAAAGTCCCAAGGCCCAGGCATCTAGTGTTC |
| NO: | (na) | CTACTGCACAGCCCCAGGCAGAAGGCAGCCTAGCCAAAGC |
| 1023 | | TACTACTGCACCTGCCACTACGCGCAATACTGGCCGTGGCG |
| | | GGGAGGAGAAGAAAAAGGAGAAAGAGAAAGAAGAACAG |
| | | GAAGAGAGGGAGACCAAGACCCCTGAATGTCCATCCCATA |
| | | CCCAGCCGCTGGGCGTCTATCTCTTGACTCCCGCAGTACAG |
| | | GACTTGTGGCTTAGAGATAAGGCCACCTTTACATGTTTCGT |
| | | CGTGGGCTCTGACCTGAAGGATGCCCATTTGACTTGGGAG |
| | | GTTGCCGGAAAGGTACCCACAGGGGGGGTTGAGGAAGGGT |
| | | TGCTGGAGCGCCATTCCAATGGCTCTCAGAGCCAGCACTCA |
| | | AGACTCACCCTTCCGAGATCCCTGTGGAACGCCGGGACCTC |
| | | TGTCACATGTACTCTAAATCATCCTAGCCTGCCCCCACAGC |
| | | GTCTGATGGCCCTTAGAGAGCCAGCCGCCCAGGCACCAGT |
| | | TAAGCTTAGCCTGAATCTGCTCGCCAGTAGTGATCCCCCAG |
| | | AGGCCGCCAGCTGGCTCTTATGCGAAGTGTCCGGCTTTAGC |
| | | CCGCCCAACATCTTGCTCATGTGGCTGGAGGACCAGCGAG |
| | | AAGTGAACACCAGCGGCTTCGCTCCAGCCCGGCCCCCACC |
| | | CCAGCCGGGTTCTACCACATTCTGGGCCTGGAGTGTCTTAA |
| | | GGGTCCCAGCACCACCTAGCCCCCAGCCAGCCACATACAC |
| | | CTGTGTTGTGTCCCATGAAGATAGCAGGACCCTGCTAAATG |
| | | CTTCTAGGAGTCTGGAGGTTTCCTACGTGACTGACCATT |
| SEQ ID | GS | GGGGSGGGGS |
| NO: | hinge/linker | |
| 1024 | (aa) | |
| SEQ ID | GS | GGTGGCGGAGGTTCTGGAGGTGGAGGTTCC |
| NO: | hinge/linker | |
| 1025 | (na) | |
| SEQ ID | CD8 | IYIWAPLAGTCGVLLLSLVITLYC |
| NO: | transmembrane (TM) | |
| 1026 | (aa) | |
| SEQ ID | CD8 | ATCTACATCTGGGCGCCCTTGGCCGGGACTTGTGGGGTCCT |
| NO: | transmembrane (TM) | TCTCCTGTCACTGGTTATCACCCTTTACTGC |
| 1027 | (na) | |
| SEQ ID | CD8 TM | ATCTACATTTGGGCCCCTCTGGCTGGTACTTGCGGGGTCCT |
| NO: | (na) | GCTGCTTTCACTCGTGATCACTCTTTACTGT |
| 1028 | | |
| SEQ ID | 4-1BB | KRGRKKLLYIFKQPFMRPVQTTQEEDGCSCRFPEEEEGGCEL |
| NO: | intracellular | |
| 1029 | domain (aa) | |
| SEQ ID | 4-1BB | AAACGGGGCAGAAAGAAACTCCTGTATATATTCAAACAAC |
| NO: | intracellular | CATTTATGAGACCAGTACAAACTACTCAAGAGGAAGATGG |
| 1030 | domain (na) | CTGTAGCTGCCGATTTCCAGAAGAAGAAGAAGGAGGATGT |
| | | GAACTG |
| SEQ ID | 4-1BB | AAGCGCGGTCGGAAGAAGCTGCTGTACATCTTTAAGCAAC |
| NO: | intracellular | CCTTCATGAGGCCTGTGCAGACTACTCAAGAGGAGGACGG |
| 1031 | domain (na) | CTGTTCATGCCGGTTCCCAGAGGAGGAGGAAGGCGGCTGC |
| | | GAACTG |
| SEQ ID | CD27 (aa) | QRRKYRSNKGESPVEPAEPCRYSCPREEEGSTIPIQEDYRKPEP |
| NO: | | ACSP |
| 1032 | | |
| SEQ ID | CD27 (na) | AGGAGTAAGAGGAGCAGGCTCCTGCACAGTGACTACATGA |
| NO: | | ACATGACTCCCCGCCGCCCCGGGCCCACCCGCAAGCATTA |
| 1033 | | CCAGCCCTATGCCCCACCACGCGACTTCGCAGCCTATCGCT |
| | | CC |
| SEQ ID | CD3-zeta | RVKFSRSADAPAYKQGQNQLYNELNLGRREEYDVLDKRRGR |
| NO: | (aa) | DPEMGGKPRRKNPQEGLYNELQKDKMAEAYSEIGMKGERRR |
| 1034 | | GKGHDGLYQGLSTATKDTYDALHMQALPPR |
| SEQ ID | CD3-zeta | AGAGTGAAGTTCAGCAGGAGCGCAGACGCCCCCGCGTACA |
| NO: | (na) | AGCAGGGCCAGAACCAGCTCTATAACGAGCTCAATCTAGG |
| 1035 | | ACGAAGAGAGGAGTACGATGTTTTGGACAAGAGACGTGGC |
| | | CGGGACCCTGAGATGGGGGGAAAGCCGAGAAGGAAGAAC |
| | | CCTCAGGAAGGCCTGTACAATGAACTGCAGAAAGATAAGA |
| | | TGGCGGAGGCCTACAGTGAGATTGGGATGAAAGGCGAGCG |
| | | CCGGAGGGGCAAGGGGCACGATGGCCTTTACCAGGGTCTC |
| | | AGTACAGCCACCAAGGACACCTACGACGCCCTTCACATGC |
| | | AGGCCCTGCCCCCTCGC |
| SEQ ID | CD3-zeta | CGCGTGAAATTCAGCCGCAGCGCAGATGCTCCAGCCTACA |
| NO: | (na) | AGCAGGGGCAGAACCAGCTCTACAACGAACTCAATCTTGG |
| 1036 | | TCGGAGAGAGGAGTACGACGTGCTGGACAAGCGGAGAGG |
| | | ACGGGACCCAGAAATGGGCGGGAAGCCGCGCAGAAAGAA |
| | | TCCCCAAGAGGGCCTGTACAACGAGCTCCAAAAGGATAAG |
| | | ATGGCAGAAGCCTATAGCGAGATTGGTATGAAAGGGGAAC |
| | | GCAGAAGAGGCAAAGGCCACGACGGACTGTACCAGGGAC |
| | | TCAGCACCGCCACCAAGGACACCTATGACGCTCTTCACATG |
| | | CAGGCCCTGCCGCCTCGG |
| SEQ ID | CD3-zeta | RVKFSRSADAPAYQQGQNQLYNELNLGRREEYDVLDKRRGR |
| NO: | (aa) | DPEMGGKPRRKNPQEGLYNELQKDKMAEAYSEIGMKGERRR |
| 1037 | | GKGHDGLYQGLSTATKDTYDALHMQALPPR |
| SEQ ID | CD3-zeta | AGAGTGAAGTTCAGCAGGAGCGCAGACGCCCCCGCGTACC |
| NO: | (na) | AGCAGGGCCAGAACCAGCTCTATAACGAGCTCAATCTAGG |
| 1038 | | ACGAAGAGAGGAGTACGATGTTTTGGACAAGAGACGTGGC |
| | | CGGGACCCTGAGATGGGGGGAAAGCCGAGAAGGAAGAAC |
| | | CCTCAGGAAGGCCTGTACAATGAACTGCAGAAAGATAAGA |
| | | TGGCGGAGGCCTACAGTGAGATTGGGATGAAAGGCGAGCG |
| | | CCGGAGGGGCAAGGGGCACGATGGCCTTTACCAGGGTCTC |
| | | AGTACAGCCACCAAGGACACCTACGACGCCCTTCACATGC |
| | | AGGCCCTGCCCCCTCGC |
| SEQ ID | linker | GGGGS |
| NO: | | |
| 1039 | | |
| SEQ ID | linker | GGTGGCGGAGGTTCTGGAGGTGGAGGTTCC |
| NO: | | |
| 1040 | | |
| SEQ ID | PD-1 | Pgwfldspdrpwnpptfspallvvtegdnatftcsfsntsesfvlnwyrmspsnqtdklaafpe |
| NO: | extracellular | drsqpgqdcrfrvtqlpngrdfhmsvvrarrndsgtylcgaislapkaqikeslraelryterrae |
| 1041 | domain (aa) | vptahpspsprpagqfqtlv |
| SEQ ID | PD-1 | Cccggatggtttctggactctccggatcgcccgtggaatcccccaaccttctcaccggcactcttg |
| NO: | extracellular | gttgtgactgagggcgataatgcgaccttcacgtgctcgttctccaacacctccgaatcattcgtgct |
| 1042 | domain (na) | gaactggtaccgcatgagcccgtcaaaccagaccgacaagctcgccgcgtttccggaagatcgg |
| | | tcgcaaccgggacaggattgtcggttccgcgtgactcaactgccgaatggcagagacttccacat |
| | | gagcgtggtccgcgctaggcgaaacgactccgggacctacctgtgcggagccatctcgctggc |
| | | gcctaaggcccaaatcaaagagagcttgagggccgaactgagagtgaccgagcgcagagctg |
| | | aggtgccaactgcacatccatccccatcgcctcggcctgcggggcagtttcagaccctggtc |
| SEQ ID | PD-1 CAR | Malpvtalllplalllhaarppgwfldspdrpwnpptfspallvvtegdnatftcsfsntsesfyln |
| NO: | (aa) with | wyrmspsnqtdklaafpedrsqpgqdcrfrvtqlpngrdfhmsvvrarrndsgtylcgaisla |
| 1043 | signal | pkaqikeslraelryterraevptahpspsprpagqfqtlytttpaprpptpaptiasqplslrpeac |
| | | rpaaggavhtrgldfacdiyiwaplagtcgvlllslvitlyckrgrkkllyifkqpfmrpvqttqee |
| | | dgcscrfpeeeeggcelrvkfsrsadapaykqgqnqlynelnlgrreeydvldkrrgrdpemg |
| | | gkprrknpqeglynelqkdkmaeayseigmkgerrrgkghdglyqglstatkdtydalhmq |
| | | alppr |
| SEQ ID | PD-1 CAR | Atggccctccctgtcactgccctgcttctccccctcgcactcctgctccacgccgctagaccaccc |
| NO: | (na) | ggatggtttctggactctccggatcgcccgtggaatcccccaaccttctcaccggcactcttggttg |
| 1044 | | tgactgagggcgataatgcgaccttcacgtgctcgttctccaacacctccgaatcattcgtgctgaa |
| | | ctggtaccgcatgagcccgtcaaaccagaccgacaagctcgccgcgtttccggaagatcggtcg |
| | | caaccgggacaggattgtcggttccgcgtgactcaactgccgaatggcagagacttccacatgag |
| | | cgtggtccgcgctaggcgaaacgactccgggacctacctgtgcggagccatctcgctggcgcct |
| | | aaggcccaaatcaaagagagcttgagggccgaactgagagtgaccgagcgcagagctgaggt |
| | | gccaactgcacatccatccccatcgcctcggcctgcggggcagtttcagaccctggtcacgacca |
| | | ctccggcgccgcgcccaccgactccggccccaactatcgcgagccagcccctgtcgctgaggc |
| | | cggaagcatgccgccctgccgccggaggtgctgtgcatacccggggattggacttcgcatgcga |
| | | catctacatttgggctcctctcgccggaacttgtggcgtgctccttctgtccctggtcatcaccctgta |
| | | ctgcaagcggggtcggaaaaagcttctgtacattttcaagcagcccttcatgaggcccgtgcaaac |
| | | cacccaggaggaggacggttgctcctgccggttccccgaagaggaagaaggaggttgcgagct |
| | | gcgcgtgaagttctcccggagcgccgacgcccccgcctataagcagggccagaaccagctgta |
| | | caacgaactgaacctgggacggcgggaagagtacgatgtgctggacaagcggcgcggccgg |
| | | gaccccgaaatgggcgggaagcctagaagaaagaaccctcaggaaggcctgtataacgagctg |
| | | cagaaggacaagatggccgaggcctactccgaaattgggatgaagggagagcggcggaggg |
| | | gaaaggggcacgacggcctgtaccaaggactgtccaccgccaccaaggacacatacgatgccc |
| | | tgcacatgcaggcccttccccctcgc |
| SEQ ID | linker | (Gly-Gly-Gly-Ser)n, where n = 1-10 |
| NO: | | |
| 1009 | | |
| SEQ ID | linker | (Gly4 Ser)4 |
| NO: | | |
| 1010 | | |
| SEQ ID | linker | (Gly4 Ser)3 |
| NO: | | |
| 1011 | | |
| SEQ ID | linker | (Gly3 Ser) |
| NO: | | |
| 1012 | | |
| SEQ ID | linker | ASGGGGSGGRASGGGGS |
| NO: | | |
| 1045 | | |
| SEQ ID | polyA | [a]₅₀₋₅₀₀₀ |
| NO: | | |
| 1013 | | |
| SEQ ID | PD1 CAR | Pgwfldspdrpwnpptfspallvvtegdnatftcsfsntsesfylnwyrmspsnqtdklaafpe |
| NO: | (aa) | drsqpgqdcrfrvtqlpngrdfhmsvvrarrndsgtylcgaislapkaqikeslraelrvterrae |
| 1046 | | vptahpspsprpagqfqtlvtttpaprpptpaptiasqplslrpeacrpaaggavhtrgldfacdi |
| | | yiwaplagtcgvlllslvitlyckrgrkkllyifkqpfmrpvqttqeedgcscrfpeeeeggcelr |
| | | vkfsrsadapaykqgqnqlynelnlgrreeydvldkrrgrdpemggkprrknpqeglynelq |
| | | kdkmaeayseigmkgerrrgkghdglyqglstatkdtydalhmqalppr |
| SEQ ID | ICOS | TKKKYSSSVHDPNGEYMFMRAVNTAKKSRLTDVTL |
| NO: | intracellular | |
| 1047 | domain (aa) | |
| SEQ ID | ICOS | ACAAAAAAGAAGTATTCATCCAGTGTGCACGACCCTAACG |
| NO: | intracellular | GTGAATACATGTTCATGAGAGCAGTGAACACAGCCAAAAA |
| 1048 | domain (na) | ATCCAGACTCACAGATGTGACCCTA |
| SEQ ID | ICOS TM | TTTPAPRPPTPAPTIASQPLSLRPEACRPAAGGAVHTRGLDFAC |
| NO: | domain (aa) | DFWLPIGCAAFVVVCILGCILICWL |
| 1049 | | |
| SEQ ID | ICOS TM | ACCACGACGCCAGCGCCGCGACCACCAACACCGGCGCCCA |
| NO: | domain (na) | CCATCGCGTCGCAGCCCCTGTCCCTGCGCCCAGAGGCGTGC |
| 1050 | | CGGCCAGCGGCGGGGGGCGCAGTGCACACGAGGGGGCTG |
| | | GACTTCGCCTGTGATTTCTGGTTACCCATAGGATGTGCAGC |
| | | CTTTGTTGTAGTCTGCATTTTGGGATGCATACTTATTTGTTG |
| | | GCTT |
| SEQ ID | CD28 | RSKRSRLLHSDYMNMTPRRPGPTRKHYQPYAPPRDFAAYRS |
| NO: | intracellular | |
| 1051 | domain (aa) | |
| SEQ ID | CD28 | AGGAGTAAGAGGAGCAGGCTCCTGCACAGTGACTACATGA |
| NO: | intracellular | ACATGACTCCCCGCCGCCCCGGGCCCACCCGCAAGCATTA |
| 1052 | domain (na) | CCAGCCCTATGCCCCACCACGCGACTTCGCAGCCTATCGCT |
| | | CC |

### CAR Antigen Binding Domain

[0358] In some embodiments, the portion of the CAR comprising the antigen binding domain comprises an antigen binding domain that targets a tumor antigen, e.g., a tumor antigen described herein. In some embodiments, the antigen binding domain binds to: CD19; CD123; CD22; CD30; CD171; CS-1; C-type lectin-like molecule-1, CD33; epidermal growth factor receptor variant III (EGFRvIII); ganglioside G2 (GD2); ganglioside GD3; TNF receptor family member; B-cell maturation antigen (BCMA); Tn antigen ((Tn Ag) or (GalNAcα-Ser/Thr)); prostate-specific membrane antigen (PSMA); Receptor tyrosine kinase-like orphan receptor 1 (ROR1); Fms-Like Tyrosine Kinase 3 (FLT3); Tumor-associated glycoprotein 72 (TAG72); CD38; CD44v6; Carcinoembryonic antigen (CEA); Epithelial cell adhesion molecule (EPCAM); B7H3 (CD276); KIT (CD117); Interleukin-13 receptor subunit alpha-2; Mesothelin; Interleukin 11 receptor alpha (IL-11Ra); prostate stem cell antigen (PSCA); Protease Serine 21; vascular endothelial growth factor receptor 2 (VEGFR2); Lewis(Y) antigen; CD24; Platelet-derived growth factor receptor beta (PDGFR-beta); Stage-specific embryonic antigen-4 (SSEA-4); CD20; Folate receptor alpha; Receptor tyrosine-protein kinase ERBB2 (Her2/neu); Mucin 1, cell surface associated (MUC1); epidermal growth factor receptor (EGFR); neural cell adhesion molecule (NCAM); Prostase; prostatic acid phosphatase (PAP); elongation factor 2 mutated (ELF2M); Ephrin B2; fibroblast activation protein alpha (FAP); insulin-like growth factor 1 receptor (IGF-I receptor), carbonic anhydrase IX (CAIX); Proteasome (Prosome, Macropain) Subunit, Beta Type, 9 (LMP2); glycoprotein 100 (gp100); oncogene fusion protein consisting of breakpoint cluster region (BCR) and Abelson murine leukemia viral oncogene homolog 1 (Abl) (bcr-abl); tyrosinase; ephrin type-A receptor 2 (EphA2); Fucosyl GM1; sialyl Lewis adhesion molecule (sLe); ganglioside GM3; transglutaminase 5 (TGS5); high molecular weight-melanoma-associated antigen (HMWMAA); o-acetyl-GD2 ganglioside (OAcGD2); Folate receptor beta; tumor endothelial marker 1 (TEM1/CD248); tumor endothelial marker 7-related (TEM7R); claudin 6 (CLDN6); thyroid stimulating hormone receptor (TSHR); G protein-coupled receptor class C group 5, member D (GPRC5D); chromosome X open reading frame 61 (CXORF61); CD97; CD179a; anaplastic lymphoma kinase (ALK); Polysialic acid; placenta-specific 1 (PLAC1); hexasaccharide portion of globoH glycoceramide (GloboH); mammary gland differentiation antigen (NY-BR-1); uroplakin 2 (UPK2); Hepatitis A virus cellular receptor 1 (HAVCR1); adrenoceptor beta 3 (ADRB3); pannexin 3 (PANX3); G protein-coupled receptor 20 (GPR20); lymphocyte antigen 6 complex, locus K 9 (LY6K); Olfactory receptor 51E2 (OR51E2); TCR Gamma Alternate Reading Frame Protein (TARP); Wilms tumor protein (WT1); Cancer/testis antigen 1 (NY-ESO-1); Cancer/testis antigen 2 (LAGE-1a); Melanoma-associated antigen 1 (MAGE-A1); ETS translocation-variant gene 6, located on chromosome 12p (ETV6-AML); sperm protein 17 (SPA17); X Antigen Family, Member 1A (XAGE1); angiopoietin-binding cell surface receptor 2 (Tie 2); melanoma cancer testis antigen-1 (MAD-CT-1); melanoma cancer testis antigen-2 (MAD-CT-2); Fos-related antigen 1; tumor protein p53 (p53); p53 mutant; prostein; surviving; telomerase; prostate carcinoma tumor antigen-1, melanoma antigen recognized by T cells 1; Rat sarcoma (Ras) mutant; human Telomerase reverse transcriptase (hTERT); sarcoma translocation breakpoints; melanoma inhibitor of apoptosis (ML-IAP); ERG (transmembrane protease, serine 2 (TMPRSS2) ETS fusion gene); N-Acetyl glucosaminyl-transferase V (NA17); paired box protein Pax-3 (PAX3); Androgen receptor; Cyclin B1; v-myc avian myelocytomatosis viral oncogene neuroblastoma derived homolog (MYCN); Ras Homolog Family Member C (RhoC); Tyrosinase-related protein 2 (TRP-2); Cytochrome P450 1B1 (CYP1B1); CCCTC-Binding Factor (Zinc Finger Protein)-Like, Squamous Cell Carcinoma Antigen Recognized By T Cells 3 (SART3); Paired box protein Pax-5 (PAX5); proacrosin binding protein sp32 (OY-TES1); lymphocyte-specific protein tyrosine kinase (LCK); A kinase anchor protein 4 (AKAP-4); synovial sarcoma, X breakpoint 2 (SSX2); Receptor for Advanced Glycation Endproducts (RAGE-1); renal ubiquitous 1 (RU1); renal ubiquitous 2 (RU2); legumain; human papilloma virus E6 (HPV E6); human papilloma virus E7 (HPV E7); intestinal carboxyl esterase; heat shock protein 70-2 mutated (mut hsp70-2); CD79a; CD79b; CD72; Leukocyte-associated immunoglobulin-like receptor 1 (LAIR1); Fc fragment of IgA receptor (FCAR or CD89); Leukocyte immunoglobulin-like receptor subfamily A member 2 (LILRA2); CD300 molecule-like family member f (CD300LF); C-type lectin domain family 12 member A (CLEC12A); bone marrow stromal cell antigen 2 (BST2); EGF-like module-containing mucin-like hormone receptor-like 2 (EMR2); lymphocyte antigen 75 (LY75); Glypican-3 (GPC3); Fc receptor-like 5 (FCRL5); or immunoglobulin lambda-like polypeptide 1 (IGLL1).

[0359] The antigen binding domain can be any domain that binds to an antigen, including but not limited to a monoclonal antibody, a polyclonal antibody, a recombinant antibody, a human antibody, a humanized antibody, and a functional fragment thereof, including but not limited to a single-domain antibody such as a heavy chain variable domain (VH), a light chain variable domain (VL) and a variable domain (VHH) of camelid derived nanobody, and to an alternative scaffold known in the art to function as antigen binding domain, such as a recombinant fibronectin domain, a T cell receptor (TCR), or a fragment there of, e.g., single chain TCR, and the like. In some instances, it is beneficial for the antigen binding domain to be derived from the same species in which the CAR will ultimately be used in. For example, for use in humans, it may be beneficial for the antigen binding domain of the CAR to comprise human or humanized residues for the antigen binding domain of an antibody or antibody fragment.

### CAR Transmembrane Domain

[0360] With respect to the transmembrane domain, in various embodiments, a CAR can be designed to comprise a transmembrane domain that is attached to the extracellular domain of the CAR. A transmembrane domain can include one or more additional amino acids adjacent to the transmembrane region, e.g., one or more amino acid associated with the extracellular region of the protein from which the transmembrane was derived (e.g., 1, 2, 3, 4, 5, 6, 7, 8, 9, 10 up to 15 amino acids of the extracellular region) and/or one or more additional amino acids associated with the intracellular region of the protein from which the transmembrane protein is derived (e.g., 1, 2, 3, 4, 5, 6, 7, 8, 9, 10 up to 15 amino acids of the intracellular region). In some embodiments, the transmembrane domain is one that is associated with one of the other domains of the CAR. In some instances, the transmembrane domain can be selected or modified by amino acid substitution to avoid binding of such domains to the transmembrane domains of the same or different surface membrane proteins, e.g., to minimize interactions with other members of the receptor complex. In some embodiments, the transmembrane domain is capable of homodimerization with another CAR on the cell surface of a CAR-expressing cell. In some embodiments, the amino acid sequence of the transmembrane domain may be modified or substituted so as to minimize interactions with the binding domains of the native binding partner present in the same CART.

[0361] The transmembrane domain may be derived either from a natural or from a recombinant source. Where the source is natural, the domain may be derived from any membrane-bound or transmembrane protein. In some embodiments the transmembrane domain is capable of signaling to the intracellular domain(s) whenever the CAR has bound to a target. A transmembrane domain of particular use in this invention may include at least the transmembrane region(s) of e.g., the alpha, beta or zeta chain of the T-cell receptor, CD28, CD27, CD3 epsilon, CD45, CD4, CD5, CD8, CD9, CD16, CD22, CD33, CD37, CD64, CD80, CD86, CD134, CD137, CD154. In some embodiments, a transmembrane domain may include at least the transmembrane region(s) of, e.g., KIR2DS2, OX40, CD2, CD27, LFA-1 (CD11a, CD18), ICOS (CD278), 4-1BB (CD137), GITR, CD40, BAFFR, HVEM (LIGHTR), SLAMF7, NKp80 (KLRF1), NKp44, NKp30, NKp46, CD160, CD19, IL2R beta, IL2R gamma, IL7R a, ITGA1, VLA1, CD49a, ITGA4, IA4, CD49D, ITGA6, VLA-6, CD49f, ITGAD, CD11d, ITGAE, CD103, ITGAL, CD11a, LFA-1, ITGAM, CD11b, ITGAX, CD11c, ITGB1, CD29, ITGB2, CD18, LFA-1, ITGB7, TNFR2, DNAM1 (CD226), SLAMF4 (CD244, 2B4), CD84, CD96 (Tactile), CEACAM1, CRTAM, Ly9 (CD229), CD160 (BY55), PSGL1, CD100 (SEMA4D), SLAMF6 (NTB-A, Ly108), SLAM (SLAMF1, CD150, IPO-3), BLAME (SLAMF8), SELPLG (CD162), LTBR, PAG/Cbp, NKG2D, NKG2C.

[0362] In some instances, the transmembrane domain can be attached to the extracellular region of the CAR, e.g., the antigen binding domain of the CAR, via a hinge, e.g., a hinge from a human protein. For example, in some embodiments, the hinge can be a human Ig (immunoglobulin) hinge, e.g., an IgG4 hinge, or a CD8a hinge. In some embodiments, the hinge or spacer comprises (e.g., consists of) the amino acid sequence of SEQ ID NO: 1018. In some embodiments, the transmembrane domain comprises (e.g., consists of) a transmembrane domain of SEQ ID NO: 1026.

[0363] In some embodiments, the hinge or spacer comprises an IgG4 hinge. For example, in some embodiments, the hinge or spacer comprises a hinge of the amino acid sequence of SEQ ID NO: 1020. In some embodiments, the hinge or spacer comprises a hinge encoded by a nucleotide sequence of SEQ ID NO: 1021.

[0364] In some embodiments, the hinge or spacer comprises an IgD hinge. For example, in some embodiments, the hinge or spacer comprises a hinge of the amino acid sequence of SEQ ID NO: 1022. In some embodiments, the hinge or spacer comprises a hinge encoded by a nucleotide sequence of SEQ ID NO: 1023.

[0365] In some embodiments, the transmembrane domain may be recombinant, in which case it will comprise predominantly hydrophobic residues such as leucine and valine. In some embodiments a triplet of phenylalanine, tryptophan and valine can be found at each end of a recombinant transmembrane domain.

[0366] Optionally, a short oligo- or polypeptide linker, between 2 and 10 amino acids in length may form the linkage between the transmembrane domain and the cytoplasmic region of the CAR. A glycine-serine doublet provides a particularly suitable linker. For example, in some embodiments, the linker comprises the amino acid sequence of SEQ ID NO: 1024. In some embodiments, the linker is encoded by a nucleotide sequence of SEQ ID NO: 1025.

[0367] In some embodiments, the hinge or spacer comprises a KIR2DS2 hinge.

### Cytoplasmic Domain

[0368] The cytoplasmic domain or region of the TOX^{hi} CAR includes an intracellular signaling domain. An intracellular signaling domain is generally responsible for activation of at least one of the normal effector functions of the immune cell in which the TOX^{hi} CAR has been introduced.

[0369] Examples of intracellular signaling domains for use in a TOX^{hi} CAR described herein include the cytoplasmic sequences of the T cell receptor (TCR) and co-receptors that act in concert to initiate signal transduction following antigen receptor engagement, as well as any derivative or variant of these sequences and any recombinant sequence that has the same functional capability.

[0370] It is known that signals generated through the TCR alone are insufficient for full activation of the T cell and that a secondary and/or costimulatory signal is also required. Thus, T cell activation can be said to be mediated by two distinct classes of cytoplasmic signaling sequences: those that initiate antigen-dependent primary activation through the TCR (primary intracellular signaling domains) and those that act in an antigen-independent manner to provide a secondary or costimulatory signal (secondary cytoplasmic domain, e.g., a costimulatory domain).

[0371] A primary signaling domain regulates primary activation of the TCR complex either in a stimulatory way, or in an inhibitory way. Primary intracellular signaling domains that act in a stimulatory manner may contain signaling motifs which are known as immunoreceptor tyrosine-based activation motifs or ITAMs.

[0372] Examples of ITAM containing primary intracellular signaling domains that are of particular use in the invention include those of TCR zeta, FcR gamma, FcR beta, CD3 gamma, CD3 delta, CD3 epsilon, CD5, CD22, CD79a, CD79b, CD278 (also known as “ICOS”), FcεRI, DAP10, DAP12, and CD66d. In some embodiments, a CAR of the invention comprises an intracellular signaling domain, e.g., a primary signaling domain of CD3-zeta, e.g., a CD3-zeta sequence described herein.

[0373] In some embodiments, a primary signaling domain comprises a modified ITAM domain, e.g., a mutated ITAM domain which has altered (e.g., increased or decreased) activity as compared to the native ITAM domain. In some embodiments, a primary signaling domain comprises a modified ITAM-containing primary intracellular signaling domain, e.g., an optimized and/or truncated ITAM-containing primary intracellular signaling domain. In some embodiments, a primary signaling domain comprises one, two, three, four or more ITAM motifs.

### Costimulatory Signaling Domain

[0374] The intracellular signalling domain of the TOX^{hi} CAR can comprise the CD3-zeta signaling domain by itself or it can be combined with any other desired intracellular signaling domain(s) useful in the context of a TOX^{hi} CAR of the invention. For example, the intracellular signaling domain of the TOX^{hi} CAR can comprise a CD3 zeta chain portion and a costimulatory signaling domain. The costimulatory signaling domain refers to a portion of the TOX^{hi} CAR comprising the intracellular domain of a costimulatory molecule. In some embodiments, the intracellular domain is designed to comprise the signaling domain of CD3-zeta and the signaling domain of CD28. In some embodiments, the intracellular domain is designed to comprise the signaling domain of CD3-zeta and the signaling domain of ICOS.

[0375] A costimulatory molecule can be a cell surface molecule other than an antigen receptor or its ligands that is required for an efficient response of lymphocytes to an antigen. Examples of such molecules include CD27, CD28, 4-1BB (CD137), OX40, CD30, CD40, PD-1, ICOS, lymphocyte function-associated antigen-1 (LFA-1), CD2, CD7, LIGHT, NKG2C, B7-H3, and a ligand that specifically binds with CD83, and the like. For example, CD27 costimulation has been demonstrated to enhance expansion, effector function, and survival of human CART cells in vitro and augments human T cell persistence and antitumor activity in vivo (Song et al. Blood. 2012; 119(3):696-706). Further examples of such costimulatory molecules include CDS, ICAM-1, GITR, BAFFR, HVEM (LIGHTR), SLAMF7, NKp80 (KLRF1), NKp30, NKp44, NKp46, CD160, CD19, CD4, CD8alpha, CD8beta, IL2R beta, IL2R gamma, IL7R alpha, ITGA4, VLA1, CD49a, ITGA4, IA4, CD49D, ITGA6, VLA-6, CD49f, ITGAD, CD11d, ITGAE, CD103, ITGAL, CD11a, LFA-1, ITGAM, CD11b, ITGAX, CD11c, ITGB1, CD29, ITGB2, CD18, LFA-1, ITGB7, TNFR2, TRANCE/RANKL, DNAM1 (CD226), SLAMF4 (CD244, 2B4), CD84, CD96 (Tactile), CEACAM1, CRTAM, Ly9 (CD229), CD160 (BY55), PSGL1, CD100 (SEMA4D), CD69, SLAMF6 (NTB-A, Ly108), SLAM (SLAMF1, CD150, IPO-3), BLAME (SLAMF8), SELPLG (CD162), LTBR, LAT, GADS, SLP-76, NKG2D, NKG2C and PAG/Cbp.

[0376] The intracellular signaling sequences within the cytoplasmic portion of the TOX^{hi} CAR may be linked to each other in a random or specified order. Optionally, a short oligo- or polypeptide linker, for example, between 2 and 10 amino acids (e.g., 2, 3, 4, 5, 6, 7, 8, 9, or 10 amino acids) in length may form the linkage between intracellular signaling sequence. In some embodiments, a glycine-serine doublet can be used as a suitable linker. In some embodiments, a single amino acid, e.g., an alanine, a glycine, can be used as a suitable linker.

[0377] In some embodiments, the intracellular signaling domain is designed to comprise two or more, e.g., 2, 3, 4, 5, or more, costimulatory signaling domains. In some embodiments, the two or more, e.g., 2, 3, 4, 5, or more, costimulatory signaling domains, are separated by a linker molecule, e.g., a linker molecule described herein. In some embodiments, the intracellular signaling domain comprises two costimulatory signaling domains. In some embodiments, the linker molecule is a glycine residue. In some embodiments, the linker is an alanine residue.

[0378] In some embodiments, the intracellular signaling domain is designed to comprise the signaling domain of CD3-zeta and the signaling domain of CD28. In some embodiments, the intracellular signaling domain is designed to comprise the signaling domain of CD3-zeta and the signaling domain of 4-1BB. In some embodiments, the signaling domain of 4-1BB is a signaling domain of SEQ ID NO: 1029. In some embodiments, the signaling domain of CD3-zeta is a signaling domain of SEQ ID NO: 1034.

[0379] In some embodiments, the intracellular signaling domain is designed to comprise the signaling domain of CD3-zeta and the signaling domain of CD27. In some embodiments, the signaling domain of CD27 comprises an amino acid sequence of SEQ ID NO: 1032. In some embodiments, the signalling domain of CD27 is encoded by a nucleic acid sequence of SEQ ID NO: 1033.

[0380] In some embodiments, the TOX^{hi} CAR cell described herein can further comprise a second CAR, e.g., a second CAR that includes a different antigen binding domain, e.g., to the same target or a different target (e.g., a target other than a cancer associated antigen described herein or a different cancer associated antigen described herein, e.g., CD19, CD33, CLL-1, CD34, FLT3, or folate receptor beta). In some embodiments, the second CAR includes an antigen binding domain to a target expressed the same cancer cell type as the cancer associated antigen. In some embodiments, the CAR-expressing cell comprises a first CAR that targets a first antigen and includes an intracellular signaling domain having a costimulatory signaling domain but not a primary signaling domain, and a second CAR that targets a second, different, antigen and includes an intracellular signaling domain having a primary signaling domain but not a costimulatory signaling domain. While not wishing to be bound by theory, placement of a costimulatory signaling domain, e.g., 4-1BB, CD28, ICOS, CD27 or OX-40, onto the first CAR, and the primary signaling domain, e.g., CD3 zeta, on the second CAR can limit the CAR activity to cells where both targets are expressed. In some embodiments, the CAR expressing cell comprises a first cancer associated antigen CAR that includes an antigen binding domain that binds a target antigen described herein, a transmembrane domain and a costimulatory domain and a second CAR that targets a different target antigen (e.g., an antigen expressed on that same cancer cell type as the first target antigen) and includes an antigen binding domain, a transmembrane domain and a primary signaling domain. In some embodiments, the CAR expressing cell comprises a first CAR that includes an antigen binding domain that binds a target antigen described herein, a transmembrane domain and a primary signaling domain and a second CAR that targets an antigen other than the first target antigen (e.g., an antigen expressed on the same cancer cell type as the first target antigen) and includes an antigen binding domain to the antigen, a transmembrane domain and a costimulatory signaling domain.

[0381] In some embodiments, the disclosure features a population of TOX^{hi} CAR cell, e.g., CART cells. In some embodiments, the population of TOX^{hi} CAR cells comprises a mixture of cells expressing different CARs. For example, in some embodiments, the population of CART cells can include a first cell expressing a CAR having an antigen binding domain to a cancer associated antigen described herein, and a second cell expressing a CAR having a different antigen binding domain, e.g., an antigen binding domain to a different a cancer associated antigen described herein, e.g., an antigen binding domain to a cancer associated antigen described herein that differs from the cancer associate antigen bound by the antigen binding domain of the CAR expressed by the first cell. As another example, the population of TOX^{hi} CAR cells can include a first cell expressing a CAR that includes an antigen binding domain to a cancer associated antigen described herein, and a second cell expressing a CAR that includes an antigen binding domain to a target other than a cancer associate antigen as described herein. In some embodiments, the population of TOX^{hi} CAR cells includes, e.g., a first cell expressing a CAR that includes a primary intracellular signaling domain, and a second cell expressing a CAR that includes a secondary signaling domain.

[0382] In some embodiments, the disclosure features a population of cells wherein at least one cell in the population expresses a TOX^{hi} CAR having an antigen binding domain to a cancer associated antigen described herein, and a second cell expressing another agent, e.g., an agent which enhances the activity of a TOX^{hi} CAR-expressing cell. For example, in some embodiments, the agent can be an agent which inhibits an inhibitory molecule. Inhibitory molecules, e.g., PD-1, can, in some embodiments, decrease the ability of a TOX^{hi} CAR-expressing cell to mount an immune effector response. Examples of inhibitory molecules include PD-1, PD-L1, CTLA4, TIM3, CEACAM (CEACAM-1, CEACAM-3, and/or CEACAM-5), LAG3, VISTA, BTLA, TIGIT, LAIR1, CD160, 2B4, CD80, CD86, B7-H3 (CD276), B7-H4 (VTCN1), HVEM (TNFRSF14 or CD270), KIR, A2aR, MHC class I, MHC class II, GALS, adenosine, and TGF (e.g., TGFbeta). In some embodiments, the agent which inhibits an inhibitory molecule comprises a first polypeptide, e.g., an inhibitory molecule, associated with a second polypeptide that provides a positive signal to the cell, e.g., an intracellular signaling domain described herein. In some embodiments, the agent comprises a first polypeptide, e.g., of an inhibitory molecule such as PD-1, PD-L1, CTLA4, TIM3, CEACAM (CEACAM-1, CEACAM-3, and/or CEACAM-5), LAG3, VISTA, BTLA, TIGIT, LAIR1, CD160, 2B4 and TGF beta, or a fragment of any of these, and a second polypeptide which is an intracellular signaling domain described herein (e.g., comprising a costimulatory domain (e.g., 41BB, CD27, OX40 or CD28, e.g., as described herein) and/or a primary signaling domain (e.g., a CD3 zeta signaling domain described herein). In some embodiments, the agent comprises a first polypeptide of PD-1 or a fragment thereof, and a second polypeptide of an intracellular signaling domain described herein (e.g., a CD28 signaling domain described herein and/or a CD3 zeta signaling domain described herein).

### CD19 CAR and CD19-Binding Sequences

[0383] In some embodiments, the TOX^{hi} CAR cell described herein is a CD19 CAR-expressing cell (e.g., a cell expressing a CAR that binds to human CD19).

[0384] In some embodiments, the antigen binding domain of the CD19 CAR has the same or a similar binding specificity as the FMC63 scFv fragment described in Nicholson et al. Mol. Immun. 34 (16-17): 1157-1165 (1997). In some embodiments, the antigen binding domain of the CD19 CAR includes the scFv fragment described in Nicholson et al. Mol. Immun. 34 (16-17): 1157-1165 (1997).

[0385] In some embodiments, the CD19 CAR includes an antigen binding domain (e.g., a humanized antigen binding domain) according to Table 3 of WO2014/153270, incorporated herein by reference. WO2014/153270 also describes methods of assaying the binding and efficacy of various CAR constructs.

[0386] In some embodiments, the parental murine scFv sequence is the CAR19 construct provided in PCT publication WO2012/079000 (incorporated herein by reference). In some embodiments, the anti-CD19 binding domain is a scFv described in WO2012/079000.

[0387] In some embodiments, the CAR molecule comprises the fusion polypeptide sequence provided as SEQ ID NO: 12 in PCT publication WO2012/079000, which provides an scFv fragment of murine origin that specifically binds to human CD19.

[0388] In some embodiments, the CD19 CAR comprises an amino acid sequence provided as SEQ ID NO: 12 in PCT publication WO2012/079000. In some embodiments, the amino acid sequence is

[0389] (MALPVTALLLPLALLLHAARP)diqmtqttsslsaslgdrvtiscrasqdiskylnwyqqkpdgtvklliy htsrlhsgvpsrfsgsgsgtdysltisnleqediatyfcqqgntlpytfgggtkleitggggsggggsggggsevklqesgpglvapsqs lsvtctvsgvslpdygvswirqpprkglewlgviwgsettyynsalksrltiikdnsksqvflkmnslqtddtaiyycakhyyyggsy amdywgqgtsvtvsstttpaprpptpaptiasqplslrpeacrpaaggavhtrgldfacdiyiwaplagtcgvlllslvitlyckrgrkkl lyifkqpfmrpvqttqeedgcscrfpeeeeggcelrvkfsrsadapaykqgqnqlynelnlgrreeydvldkrrgrdpemggkprrk npqeglynelqkdkmaeayseigmkgerrrgkghdglyqglstatkdtydalhmqalppr (SEQ ID NO: 1053), or a sequence substantially homologous thereto. The optional sequence of the signal peptide is shown in capital letters and parenthesis.

[0390] In some embodiments, the amino acid sequence is:

[0391] diqmtqttsslsaslgdrvtiscrasqdiskylnwyqqkpdgtvklliyhtsrlhsgvpsrfsgsgsgtdysltisnleqediat yfcqqgntlpytfgggtkleitggggsggggsggggsevklqesgpglvapsqslsvtctvsgvslpdygvswirqpprkglewlgv iwgsettyynsalksrltiikdnsksqvflkmnslqtddtaiyycakhyyyggsyamdywgqgtsvtvsstttpaprpptpaptiasq plslrpeacrpaaggavhtrgldfacdiyiwaplagtcgvlllslvitlyckrgrkkllyifkqpfmrpvqttqeedgcscrfpeeeeggc elrvkfsrsadapaykqgqnqlynelnlgrreeydvldkrrgrdpemggkprrknpqeglynelqkdkmaeayseigmkgerrrg kghdglyqglstatkdtydalhmqalppr (SEQ ID NO: 1054), or a sequence substantially homologous thereto.

[0392] In some embodiments, the CD19 CAR has the USAN designation TISAGENLECLEUCEL-T. In embodiments, CTL019 is made by a gene modification of T cells is mediated by stable insertion via transduction with a self-inactivating, replication deficient Lentiviral (LV) vector containing the CTL019 transgene under the control of the EF-1 alpha promoter. CTL019 can be a mixture of transgene positive and negative T cells that are delivered to the subject on the basis of percent transgene positive T cells.

[0393] In other embodiments, the CD19 CAR comprises an antigen binding domain (e.g., a humanized antigen binding domain) according to Table 3 of WO2014/153270, incorporated herein by reference.

[0394] Humanization of murine CD19 antibody is desired for the clinical setting, where the mouse-specific residues may induce a human-anti-mouse antigen (HAMA) response in patients who receive CART19 treatment, i.e., treatment with T cells transduced with the CAR19 construct. The production, characterization, and efficacy of humanized CD19 CAR sequences is described in International Application WO2014/153270 which is herein incorporated by reference in its entirety, including Examples 1-5 (p. 115-159).

[0395] In some embodiments, CD19 CAR constructs are described in PCT publication WO 2012/079000, incorporated herein by reference, and the amino acid sequence of the murine CD19 CAR and scFv constructs are shown in Table 11 below, or a sequence substantially identical to any of the aforesaid sequences (e.g., at least 85%, 90%, 95% or more identical to any of the sequences described herein).

TABLE 11
CD19 CAR Constructs

| | | |
|---|---|---|
| SEQ ID | | |
| NO | Region | Sequence |

CTL019

| | | |
|---|---|---|
| SEQ ID | CTL019 | MALPVTALLLPLALLLHAARPDIQMTQTTSSLSASLGDRVTIS |
| NO: 1055 | Full | CRASQDISKYLNWYQQKPDGTVKLLIYHTSRLHSGVPSRFSG |
| | amino | SGSGTDYSLTISNLEQEDIATYFCQQGNTLPYTFGGGTKLEIT |
| | acid | GGGGSGGGGSGGGGSEVKLQESGPGLVAPSQSLSVTCTVSG |
| | sequence | VSLPDYGVSWIRQPPRKGLEWLGVIWGSETTYYNSALKSRL |
| | | TIIKDNSKSQVFLKMNSLQTDDTAIYYCAKHYYYGGSYAMD |
| | | YWGQGTSVTVSSTTTPAPRPPTPAPTIASQPLSLRPEACRPAA |
| | | GGAVHTRGLDFACDIYIWAPLAGTCGVLLLSLVITLYCKRGR |
| | | KKLLYIFKQPFMRPVQTTQEEDGCSCRFPEEEEGGCELRVKF |
| | | SRSADAPAYKQGQNQLYNELNLGRREEYDVLDKRRGRDPE |
| | | MGGKPRRKNPQEGLYNELQKDKMAEAYSEIGMKGERRRGK |
| | | GHDGLYQGLSTATKDTYDALHMQALPPR |
| SEQ ID | CTL019 | ATGGCCTTACCAGTGACCGCCTTGCTCCTGCCGCTGGCCTT |
| NO: 1056 | Full | GCTGCTCCACGCCGCCAGGCCGGACATCCAGATGACACAG |
| | nucleotide | ACTACATCCTCCCTGTCTGCCTCTCTGGGAGACAGAGTCA |
| | sequence | CCATCAGTTGCAGGGCAAGTCAGGACATTAGTAAATATTT |
| | | AAATTGGTATCAGCAGAAACCAGATGGAACTGTTAAACTC |
| | | CTGATCTACCATACATCAAGATTACACTCAGGAGTCCCAT |
| | | CAAGGTTCAGTGGCAGTGGGTCTGGAACAGATTATTCTCT |
| | | CACCATTAGCAACCTGGAGCAAGAAGATATTGCCACTTAC |
| | | TTTTGCCAACAGGGTAATACGCTTCCGTACACGTTCGGAG |
| | | GGGGGACCAAGCTGGAGATCACAGGTGGCGGTGGCTCGG |
| | | GCGGTGGTGGGTCGGGTGGCGGCGGATCTGAGGTGAAAC |
| | | TGCAGGAGTCAGGACCTGGCCTGGTGGCGCCCTCACAGAG |
| | | CCTGTCCGTCACATGCACTGTCTCAGGGGTCTCATTACCCG |
| | | ACTATGGTGTAAGCTGGATTCGCCAGCCTCCACGAAAGGG |
| | | TCTGGAGTGGCTGGGAGTAATATGGGGTAGTGAAACCAC |
| | | ATACTATAATTCAGCTCTCAAATCCAGACTGACCATCATC |
| | | AAGGACAACTCCAAGAGCCAAGTTTTCTTAAAAATGAACA |
| | | GTCTGCAAACTGATGACACAGCCATTTACTACTGTGCCAA |
| | | ACATTATTACTACGGTGGTAGCTATGCTATGGACTACTGG |
| | | GGCCAAGGAACCTCAGTCACCGTCTCCTCAACCACGACGC |
| | | CAGCGCCGCGACCACCAACACCGGCGCCCACCATCGCGTC |
| | | GCAGCCCCTGTCCCTGCGCCCAGAGGCGTGCCGGCCAGCG |
| | | GCGGGGGGCGCAGTGCACACGAGGGGGCTGGACTTCGCC |
| | | TGTGATATCTACATCTGGGCGCCCTTGGCCGGGACTTGTG |
| | | GGGTCCTTCTCCTGTCACTGGTTATCACCCTTTACTGCAAA |
| | | CGGGGCAGAAAGAAACTCCTGTATATATTCAAACAACCAT |
| | | TTATGAGACCAGTACAAACTACTCAAGAGGAAGATGGCT |
| | | GTAGCTGCCGATTTCCAGAAGAAGAAGAAGGAGGATGTG |
| | | AACTGAGAGTGAAGTTCAGCAGGAGCGCAGACGCCCCCG |
| | | CGTACAAGCAGGGCCAGAACCAGCTCTATAACGAGCTCA |
| | | ATCTAGGACGAAGAGAGGAGTACGATGTTTTGGACAAGA |
| | | GACGTGGCCGGGACCCTGAGATGGGGGGAAAGCCGAGAA |
| | | GGAAGAACCCTCAGGAAGGCCTGTACAATGAACTGCAGA |
| | | AAGATAAGATGGCGGAGGCCTACAGTGAGATTGGGATGA |
| | | AAGGCGAGCGCCGGAGGGGCAAGGGGCACGATGGCCTTT |
| | | ACCAGGGTCTCAGTACAGCCACCAAGGACACCTACGACG |
| | | CCCTTCACATGCAGGCCCTGCCCCCTCGC |
| SEQ ID | CTL019 | DIQMTQTTSSLSASLGDRVTISCRASQDISKYLNWYQQKPDG |
| NO: 1057 | scFv | TVKLLIYHTSRLHSGVPSRFSGSGSGTDYSLTISNLEQEDIATY |
| | domain | FCQQGNTLPYTFGGGTKLEITGGGGSGGGGSGGGGSEVKLQ |
| | | ESGPGLVAPSQSLSVTCTVSGVSLPDYGVSWIRQPPRKGLEW |
| | | LGVIWGSETTYYNSALKSRLTIIKDNSKSQVFLKMNSLQTDD |
| | | TAIYYCAKHYYYGGSYAMDYWGQGTSVTVSS |

mCAR1

| | | |
|---|---|---|
| SEQ ID | mCAR1 | QVQLLESGAELVRPGSSVKISCKASGYAFSSYWMNWVKQRP |
| NO: 1058 | scFv | GQGLEWIGQIYPGDGDTNYNGKFKGQATLTADKSSSTAYM |
| | | QLSGLTSEDSAVYSCARKTISSVVDFYFDYWGQGTTVTGGG |
| | | SGGGSGGGSGGGSELVLTQSPKFMSTSVGDRVSVTCKASQN |
| | | VGTNVAWYQQKPGQSPKPLIYSATYRNSGVPDRFTGSGSGT |
| | | DFTLTITNVQSKDLADYFCQYNRYPYTSFFFTKLEIKRRS |
| SEQ ID | mCAR1 | QVQLLESGAELVRPGSSVKISCKASGYAFSSYWMNWVKQRP |
| NO: 1059 | Full | GQGLEWIGQIYPGDGDTNYNGKFKGQATLTADKSSSTAYM |
| | amino | QLSGLTSEDSAVYSCARKTISSVVDFYFDYWGQGTTVTGGG |
| | acid | SGGGSGGGSGGGSELVLTQSPKFMSTSVGDRVSVTCKASQN |
| | sequence | VGTNVAWYQQKPGQSPKPLIYSATYRNSGVPDRFTGSGSGT |
| | | DFTLTITNVQSKDLADYFCQYNRYPYTSFFFTKLEIKRRSKIE |
| | | VMYPPPYLDNEKSNGTIIHVKGKHLCPSPLFPGPSKPFWVLV |
| | | VVGGVLACYSLLVTVAFIIFWVRSKRSRLLHSDYMNMTPRR |
| | | PGPTRKHYQPYAPPRDFAAYRSRVKFSRSADAPAYQQGQNQ |
| | | LYNELNLGRREEYDVLDKRRGRDPEMGGKPRRKNPQEGLY |
| | | NELQKDKMAEAYSEIGMKGERRRGKGHDGLYQGLSTATKD |
| | | TYDALHMQALPPR |

mCAR2

| | | |
|---|---|---|
| SEQ ID | mCAR2 | DIQMTQTTSSLSASLGDRVTISCRASQDISKYLNWYQQKPDG |
| NO: 1060 | scFv | TVKLLIYHTSRLHSGVPSRFSGSGSGTDYSLTISNLEQEDIATY |
| | | FCQQGNTLPYTFGGGTKLEITGSTSGSGKPGSGEGSTKGEVK |
| | | LQESGPGLVAPSQSLSVTCTVSGVSLPDYGVSWIRQPPRKGL |
| | | EWLGVIWGSETTYYNSALKSRLTIIKDNSKSQVFLKMNSLQT |
| | | DDTAIYYCAKHYYYGGSYAMDYWGQGTSVTVSSE |
| SEQ ID | mCAR2 | DIQMTQTTSSLSASLGDRVTISCRASQDISKYLNWYQQKPDG |
| NO: 1061 | amino | TVKLLIYHTSRLHSGVPSRFSGSGSGTDYSLTISNLEQEDIATY |
| | acid | FCQQGNTLPYTFGGGTKLEITGSTSGSGKPGSGEGSTKGEVK |
| | sequence | LQESGPGLVAPSQSLSVTCTVSGVSLPDYGVSWIRQPPRKGL |
| | | EWLGVIWGSETTYYNSALKSRLTIIKDNSKSQVFLKMNSLQT |
| | | DDTAIYYCAKHYYYGGSYAMDYWGQGTSVTVSSESKYGPP |
| | | CPPCPMFWVLVVVGGVLACYSLLVTVAFIIFWVKRGRKKLL |
| | | YIFKQPFMRPVQTTQEEDGCSCRFEEEEGGCELRVKFSRSAD |
| | | APAYQQGQNQLYNELNLGRREEYDVLDKRRGRDPEMGGKP |
| | | RRKNPQEGLYNELQKDKMAEAYSEIGMKGERRRGKGHDGL |
| | | YQGLSTATKDTYDALHMQALPPRL |
| SEQ ID | mCAR2 | DIQMTQTTSSLSASLGDRVTISCRASQDISKYLNWYQQKPDG |
| NO: 1062 | full amino | TVKLLIYHTSRLHSGVPSRFSGSGSGTDYSLTISNLEQEDIATY |
| | acid | FCQQGNTLPYTFGGGTKLEITGSTSGSGKPGSGEGSTKGEVK |
| | sequence | LQESGPGLVAPSQSLSVTCTVSGVSLPDYGVSWIRQPPRKGL |
| | | EWLGVIWGSETTYYNSALKSRLTIIKDNSKSQVFLKMNSLQT |
| | | DDTAIYYCAKHYYYGGSYAMDYWGQGTSVTVSSESKYGPP |
| | | CPPCPMFWVLVVVGGVLACYSLLVTVAFIIFWVKRGRKKLL |
| | | YIFKQPFMRPVQTTQEEDGCSCRFEEEEGGCELRVKFSRSAD |
| | | APAYQQGQNQLYNELNLGRREEYDVLDKRRGRDPEMGGKP |
| | | RRKNPQEGLYNELQKDKMAEAYSEIGMKGERRRGKGHDGL |
| | | YQGLSTATKDTYDALHMQALPPRLEGGGEGRGSLLTCGDVE |
| | | ENPGPRMLLLVTSLLLCELPHPAFLLIPRKVCNGIGIGEFKDSL |
| | | SINATNIKHFKNCTSISGDLHILPVAFRGDSFTHTPPLDPQELD |
| | | ILKTVKEITGFLLIQAWPENRTDLHAFENLEIIRGRTKQHGQF |
| | | SLAVVSLNITSLGLRSLKEISDGDVIISGNKNLCYANTINWKK |
| | | LFGTSGQKTKIISNRGENSCKATGQVCHALCSPEGCWGPEPR |
| | | DCVSCRNVSRGRECVDKCNLLEGEPREFVENSECIQCHPECL |
| | | PQAMNITCTGRGPDNCIQCAHYIDGPHCVKTCPAGVMGENN |
| | | TLVWKYADAGHVCHLCHPNCTYGCTGPGLEGCPTNGPKIPS |
| | | IATGMVGALLLLLVVALGIGLFM |

mCAR3

| | | |
|---|---|---|
| SEQ ID | mCAR3 | DIQMTQTTSSLSASLGDRVTISCRASQDISKYLNWYQQKPDG |
| NO: 1063 | scFv | TVKLLIYHTSRLHSGVPSRFSGSGSGTDYSLTISNLEQEDIATY |
| | | FCQQGNTLPYTFGGGTKLEITGSTSGSGKPGSGEGSTKGEVK |
| | | LQESGPGLVAPSQSLSVTCTVSGVSLPDYGVSWIRQPPRKGL |
| | | EWLGVIWGSETTYYNSALKSRLTIIKDNSKSQVFLKMNSLQT |
| | | DDTAIYYCAKHYYYGGSYAMDYWGQGTSVTVSS |
| SEQ ID | mCAR3 | DIQMTQTTSSLSASLGDRVTISCRASQDISKYLNWYQQKPDG |
| NO: 1064 | full amino | TVKLLIYHTSRLHSGVPSRFSGSGSGTDYSLTISNLEQEDIATY |
| | acid | FCQQGNTLPYTFGGGTKLEITGSTSGSGKPGSGEGSTKGEVK |
| | sequence | LQESGPGLVAPSQSLSVTCTVSGVSLPDYGVSWIRQPPRKGL |
| | | EWLGVIWGSETTYYNSALKSRLTIIKDNSKSQVFLKMNSLQT |
| | | DDTAIYYCAKHYYYGGSYAMDYWGQGTSVTVSSAAAIEVM |
| | | YPPPYLDNEKSNGTIIHVKGKHLCPSPLFPGPSKPFWVLVVV |
| | | GGVLACYSLLVTVAFIIFWVRSKRSRLLHSDYMNMTPRRPGP |
| | | TRKHYQPYAPPRDFAAYRSRVKFSRSADAPAYQQGQNQLY |
| | | NELNLGRREEYDVLDKRRGRDPEMGGKPRRKNPQEGLYNE |
| | | LQKDKMAEAYSEIGMKGERRRGKGHDGLYQGLSTATKDTY |
| | | DALHMQALPPR |

SSJ25-C1

| | | |
|---|---|---|
| SEQ ID | SSJ25-C1 | QVQLLESGAELVRPGSSVKISCKASGYAFSSYWMNWVKQRP |
| NO: 1065 | VH | GQGLEWIGQIYPGDGDTNYNGKFKGQATLTADKSSSTAYM |
| | sequence | QLSGLTSEDSAVYSCARKTISSVVDFYFDYWGQGTTVT |
| SEQ ID | SSJ25-C1 | ELVLTQSPKFMSTSVGDRVSVTCKASQNVGTNVAWYQQKP |
| NO: 1066 | VL | GQSPKPLIYSATYRNSGVPDRFTGSGSGTDFTLTITNVQSKDL |
| | | ADYFYFCQYNRYPYTSGGGTKLEIKRRS |

Humanized CAR1

| | | |
|---|---|---|
| SEQ ID | CAR1 | EIVMTQSPATLSLSPGERATLSCRASQDISKYLNWYQQKPGQ |
| NO: 1067 | scFv | APRLLIYHTSRLHSGIPARFSGSGSGTDYTLTISSLQPEDFAVY |
| | domain | FCQQGNTLPYTFGQGTKLEIKGGGGSGGGGSGGGGSQVQLQ |
| | | ESGPGLVKPSETLSLTCTVSGVSLPDYGVSWIRQPPGKGLEWI |
| | | GVIWGSETTYYSSSLKSRVTISKDNSKNQVSLKLSSVTAADT |
| | | AVYYCAKHYYYGGSYAMDYWGQGTLVTVSS |
| SEQ ID | CAR1- | MALPVTALLLPLALLLHAARPEIVMTQSPATLSLSPGERATLS |
| NO: 1068 | Full-aa | CRASQDISKYLNWYQQKPGQAPRLLIYHTSRLHSGIPARFSG |
| | | SGSGTDYTLTISSLQPEDFAVYFCQQGNTLPYTFGQGTKLEIK |
| | | GGGGSGGGGSGGGGSQVQLQESGPGLVKPSETLSLTCTVSG |
| | | VSLPDYGVSWIRQPPGKGLEWIGVIWGSETTYYSSSLKSRVTI |
| | | SKDNSKNQVSLKLSSVTAADTAVYYCAKHYYYGGSYAMDY |
| | | WGQGTLVTVSSTTTPAPRPPTPAPTIASQPLSLRPEACRPAAG |
| | | GAVHTRGLDFACDIYIWAPLAGTCGVLLLSLVITLYCKRGRK |
| | | KLLYIFKQPFMRPVQTTQEEDGCSCRFPEEEEGGCELRVKFS |
| | | RSADAPAYKQGQNQLYNELNLGRREEYDVLDKRRGRDPEM |
| | | GGKPRRKNPQEGLYNELQKDKMAEAYSEIGMKGERRRGKG |
| | | HDGLYQGLSTATKDTYDALHMQALPPR |

Humanized CAR2

| | | |
|---|---|---|
| SEQ ID | CAR2 | EIVMTQSPATLSLSPGERATLSCRASQDISKYLNWYQQKPGQ |
| NO: 1069 | scFv | APRLLIYHTSRLHSGIPARFSGSGSGTDYTLTISSLQPEDFAVY |
| | domain- | FCQQGNTLPYTFGQGTKLEIKGGGGSGGGGSGGGGSQVQLQ |
| | aa (Linker | ESGPGLVKPSETLSLTCTVSGVSLPDYGVSWIRQPPGKGLEWI |
| | is | GVIWGSETTYYQSSLKSRVTISKDNSKNQVSLKLSSVTAADT |
| | underlined) | AVYYCAKHYYYGGSYAMDYWGQGTLVTVSS |
| SEQ ID | CAR2 | atggccctccctgtcaccgccctgctgcttccgctggctcttctgctccacgccgctcggcccga |
| NO: 1070 | scFv | aattgtgatgacccagtcacccgccactcttagcctttcacccggtgagcgcgcaaccctgtcttg |
| | domain- | cagagcctcccaagacatctcaaaataccttaattggtatcaacagaagcccggacaggctcctc |
| | nt | gccttctgatctaccacaccagccggctccattctggaatccctgccaggttcagcggtagcgga |
| | | tctgggaccgactacaccctcactatcagctcactgcagccagaggacttcgctgtctatttctgtc |
| | | agcaagggaacaccctgccctacacctttggacagggcaccaagctcgagattaaaggtggag |
| | | gtggcagcggaggaggtgggtccggcggtggaggaagccaggtccaactccaagaaagcg |
| | | gaccgggtcttgtgaagccatcagaaactctttcactgacttgtactgtgagcggagtgtctctccc |
| | | cgattacggggtgtcttggatcagacagccaccggggaagggtctggaatggattggagtgattt |
| | | ggggctctgagactacttactaccaatcatccctcaagtcacgcgtcaccatctcaaaggacaact |
| | | ctaagaatcaggtgtcactgaaactgtcatctgtgaccgcagccgacaccgccgtgtactattgc |
| | | gctaagcattactattatggcgggagctacgcaatggattactggggacagggtactctggtcac |
| | | cgtgtccagccaccaccatcatcaccatcaccat |
| SEQ ID | CAR2- | MALPVTALLLPLALLLHAARPEIVMTQSPATLSLSPGERATLS |
| NO: 1071 | Full-aa | CRASQDISKYLNWYQQKPGQAPRLLIYHTSRLHSGIPARFSG |
| | | SGSGTDYTLTISSLQPEDFAVYFCQQGNTLPYTFGQGTKLEIK |
| | | GGGGSGGGGSGGGGSQVQLQESGPGLVKPSETLSLTCTVSG |
| | | VSLPDYGVSWIRQPPGKGLEWIGVIWGSETTYYQSSLKSRVT |
| | | ISKDNSKNQVSLKLSSVTAADTAVYYCAKHYYYGGSYAMD |
| | | YWGQGTLVTVSSTTTPAPRPPTPAPTIASQPLSLRPEACRPAA |
| | | GGAVHTRGLDFACDIYIWAPLAGTCGVLLLSLVITLYCKRGR |
| | | KKLLYIFKQPFMRPVQTTQEEDGCSCRFPEEEEGGCELRVKF |
| | | SRSADAPAYKQGQNQLYNELNLGRREEYDVLDKRRGRDPE |
| | | MGGKPRRKNPQEGLYNELQKDKMAEAYSEIGMKGERRRGK |
| | | GHDGLYQGLSTATKDTYDALHMQALPPR |
| SEQ ID | CAR2- | atggccctccctgtcaccgccctgctgcttccgctggctcttctgctccacgccgctcggcccga |
| NO: 1072 | Full-nt | aattgtgatgacccagtcacccgccactcttagcctttcacccggtgagcgcgcaaccctgtcttg |
| | | cagagcctcccaagacatctcaaaataccttaattggtatcaacagaagcccggacaggctcctc |
| | | gccttctgatctaccacaccagccggctccattctggaatccctgccaggttcagcggtagcgga |
| | | tctgggaccgactacaccctcactatcagctcactgcagccagaggacttcgctgtctatttctgtc |
| | | agcaagggaacaccctgccctacacctttggacagggcaccaagctcgagattaaaggtggag |
| | | gtggcagcggaggaggtgggtccggcggtggaggaagccaggtccaactccaagaaagcg |
| | | gaccgggtcttgtgaagccatcagaaactctttcactgacttgtactgtgagcggagtgtctctccc |
| | | cgattacggggtgtcttggatcagacagccaccggggaagggtctggaatggattggagtgattt |
| | | ggggctctgagactacttactaccaatcatccctcaagtcacgcgtcaccatctcaaaggacaact |
| | | ctaagaatcaggtgtcactgaaactgtcatctgtgaccgcagccgacaccgccgtgtactattgc |
| | | gctaagcattactattatggcgggagctacgcaatggattactggggacagggtactctggtcac |
| | | cgtgtccagcaccactaccccagcaccgaggccacccaccccggctcctaccatcgcctccca |
| | | gcctctgtccctgcgtccggaggcatgtagacccgcagctggtggggccgtgcatacccgggg |
| | | tcttgacttcgcctgcgatatctacatttgggcccctctggctggtacttgcggggtcctgctgcttt |
| | | cactcgtgatcactctttactgtaagcgcggtcggaagaagctgctgtacatctttaagcaaccctt |
| | | catgaggcctgtgcagactactcaagaggaggacggctgttcatgccggttcccagaggagga |
| | | ggaaggcggctgcgaactgcgcgtgaaattcagccgcagcgcagatgctccagcctacaagc |
| | | aggggcagaaccagctctacaacgaactcaatcttggtcggagagaggagtacgacgtgctgg |
| | | acaagcggagaggacgggacccagaaatgggcgggaagccgcgcagaaagaatccccaag |
| | | agggcctgtacaacgagctccaaaaggataagatggcagaagcctatagcgagattggtatga |
| | | aaggggaacgcagaagaggcaaaggccacgacggactgtaccagggactcagcaccgcca |
| | | ccaaggacacctatgacgctcttcacatgcaggccctgccgcctcgg |
| SEQ ID | CAR2- | MALPVTALLLPLALLLHAARPeivmtqspatlslspgeratlscrasqdisk |
| NO: 1073 | Soluble | ylnwyqqkpgqaprlliyhtsrlhsgiparfsgsgsgtdytltisslqpedfavyfcqqgntlpy |
| | scFv-aa | tfgqgtkleikggggsggggsggggsqvqlqesgpglvkpsetlsltctvsgvslpdygvswi |
| | | rqppgkglewigviwgsettyyqsslksrvtiskdnsknqvslklssvtaadtavyycakhyy |
| | | yggsyamdywgqgtivtvsshhhhhhhh |

Humanized CAR3

| | | |
|---|---|---|
| SEQ ID | CAR3 | QVQLQESGPGLVKPSETLSLTCTVSGVSLPDYGVSWIRQPPG |
| NO: 1074 | scFv | KGLEWIGVIWGSETTYYSSSLKSRVTISKDNSKNQVSLKLSS |
| | domain | VTAADTAVYYCAKHYYYGGSYAMDYWGQGTLVTVSSGGG |
| | | GSGGGGSGGGGSEIVMTQSPATLSLSPGERATLSCRASQDISK |
| | | YLNWYQQKPGQAPRLLIYHTSRLHSGIPARFSGSGSGTDYTL |
| | | TISSLQPEDFAVYFCQQGNTLPYTFGQGTKLEIK |
| SEQ ID | CAR3- | MALPVTALLLPLALLLHAARPQVQLQESGPGLVKPSETLSLT |
| NO: 1075 | Full-aa | CTVSGVSLPDYGVSWIRQPPGKGLEWIGVIWGSETTYYSSSL |
| | | KSRVTISKDNSKNQVSLKLSSVTAADTAVYYCAKHYYYGGS |
| | | YAMDYWGQGTLVTVSSGGGGSGGGGSGGGGSEIVMTQSPA |
| | | TLSLSPGERATLSCRASQDISKYLNWYQQKPGQAPRLLIYHT |
| | | SRLHSGIPARFSGSGSGTDYTLTISSLQPEDFAVYFCQQGNTL |
| | | PYTFGQGTKLEIKTTTPAPRPPTPAPTIASQPLSLRPEACRPAA |
| | | GGAVHTRGLDFACDIYIWAPLAGTCGVLLLSLVITLYCKRGR |
| | | KKLLYIFKQPFMRPVQTTQEEDGCSCRFPEEEEGGCELRVKF |
| | | SRSADAPAYKQGQNQLYNELNLGRREEYDVLDKRRGRDPE |
| | | MGGKPRRKNPQEGLYNELQKDKMAEAYSEIGMKGERRRGK |
| | | GHDGLYQGLSTATKDTYDALHMQALPPR |

Humanized CAR4

| | | |
|---|---|---|
| SEQ ID | CAR4 | QVQLQESGPGLVKPSETLSLTCTVSGVSLPDYGVSWIRQPPG |
| NO: 1076 | scFv | KGLEWIGVIWGSETTYYQSSLKSRVTISKDNSKNQVSLKLSS |
| | domain | VTAADTAVYYCAKHYYYGGSYAMDYWGQGTLVTVSSGGG |
| | | GSGGGGSGGGGSEIVMTQSPATLSLSPGERATLSCRASQDISK |
| | | YLNWYQQKPGQAPRLLIYHTSRLHSGIPARFSGSGSGTDYTL |
| | | TISSLQPEDFAVYFCQQGNTLPYTFGQGTKLEIK |
| SEQ ID | CAR4- | MALPVTALLLPLALLLHAARPQVQLQESGPGLVKPSETLSLT |
| NO: 1077 | Full-aa | CTVSGVSLPDYGVSWIRQPPGKGLEWIGVIWGSETTYYQSSL |
| | | KSRVTISKDNSKNQVSLKLSSVTAADTAVYYCAKHYYYGGS |
| | | YAMDYWGQGTLVTVSSGGGGSGGGGSGGGGSEIVMTQSPA |
| | | TLSLSPGERATLSCRASQDISKYLNWYQQKPGQAPRLLIYHT |
| | | SRLHSGIPARFSGSGSGTDYTLTISSLQPEDFAVYFCQQGNTL |
| | | PYTFGQGTKLEIKTTTPAPRPPTPAPTIASQPLSLRPEACRPAA |
| | | GGAVHTRGLDFACDIYIWAPLAGTCGVLLLSLVITLYCKRGR |
| | | KKLLYIFKQPFMRPVQTTQEEDGCSCRFPEEEEGGCELRVKF |
| | | SRSADAPAYKQGQNQLYNELNLGRREEYDVLDKRRGRDPE |
| | | MGGKPRRKNPQEGLYNELQKDKMAEAYSEIGMKGERRRGK |
| | | GHDGLYQGLSTATKDTYDALHMQALPPR |

Humanized CAR5

| | | |
|---|---|---|
| SEQ ID | CAR5 | EIVMTQSPATLSLSPGERATLSCRASQDISKYLNWYQQKPGQ |
| NO: 1078 | scFv | APRLLIYHTSRLHSGIPARFSGSGSGTDYTLTISSLQPEDFAVY |
| | domain | FCQQGNTLPYTFGQGTKLEIKGGGGSGGGGSGGGGSGGGGS |
| | | QVQLQESGPGLVKPSETLSLTCTVSGVSLPDYGVSWIRQPPG |
| | | KGLEWIGVIWGSETTYYSSSLKSRVTISKDNSKNQVSLKLSS |
| | | VTAADTAVYYCAKHYYYGGSYAMDYWGQGTLVTVSS |
| SEQ ID | CAR5- | MALPVTALLLPLALLLHAARPEIVMTQSPATLSLSPGERATLS |
| NO: 1079 | Full-aa | CRASQDISKYLNWYQQKPGQAPRLLIYHTSRLHSGIPARFSG |
| | | SGSGTDYTLTISSLQPEDFAVYFCQQGNTLPYTFGQGTKLEIK |
| | | GGGGSGGGGSGGGGSGGGGSQVQLQESGPGLVKPSETLSLT |
| | | CTVSGVSLPDYGVSWIRQPPGKGLEWIGVIWGSETTYYSSSL |
| | | KSRVTISKDNSKNQVSLKLSSVTAADTAVYYCAKHYYYGGS |
| | | YAMDYWGQGTLVTVSSTTTPAPRPPTPAPTIASQPLSLRPEA |
| | | CRPAAGGAVHTRGLDFACDIYIWAPLAGTCGVLLLSLVITLY |
| | | CKRGRKKLLYIFKQPFMRPVQTTQEEDGCSCRFPEEEEGGCE |
| | | LRVKFSRSADAPAYKQGQNQLYNELNLGRREEYDVLDKRR |
| | | GRDPEMGGKPRRKNPQEGLYNELQKDKMAEAYSEIGMKGE |
| | | RRRGKGHDGLYQGLSTATKDTYDALHMQALPPR |

Humanized CAR6

| | | |
|---|---|---|
| SEQ ID | CAR6 | EIVMTQSPATLSLSPGERATLSCRASQDISKYLNWYQQKPGQ |
| NO: 1080 | scFv | APRLLIYHTSRLHSGIPARFSGSGSGTDYTLTISSLQPEDFAVY |
| | domain | FCQQGNTLPYTFGQGTKLEIKGGGGSGGGGSGGGGSGGGGS |
| | | QVQLQESGPGLVKPSETLSLTCTVSGVSLPDYGVSWIRQPPG |
| | | KGLEWIGVIWGSETTYYQSSLKSRVTISKDNSKNQVSLKLSS |
| | | VTAADTAVYYCAKHYYYGGSYAMDYWGQGTLVTVSS |
| SEQ ID | CAR6- | MALPVTALLLPLALLLHAARPEIVMTQSPATLSLSPGERATLS |
| NO: 1081 | Full-aa | CRASQDISKYLNWYQQKPGQAPRLLIYHTSRLHSGIPARFSG |
| | | SGSGTDYTLTISSLQPEDFAVYFCQQGNTLPYTFGQGTKLEIK |
| | | GGGGSGGGGSGGGGSGGGGSQVQLQESGPGLVKPSETLSLT |
| | | CTVSGVSLPDYGVSWIRQPPGKGLEWIGVIWGSETTYYQSSL |
| | | KSRVTISKDNSKNQVSLKLSSVTAADTAVYYCAKHYYYGGS |
| | | YAMDYWGQGTLVTVSSTTTPAPRPPTPAPTIASQPLSLRPEA |
| | | CRPAAGGAVHTRGLDFACDIYIWAPLAGTCGVLLLSLVITLY |
| | | CKRGRKKLLYIFKQPFMRPVQTTQEEDGCSCRFPEEEEGGCE |
| | | LRVKFSRSADAPAYKQGQNQLYNELNLGRREEYDVLDKRR |
| | | GRDPEMGGKPRRKNPQEGLYNELQKDKMAEAYSEIGMKGE |
| | | RRRGKGHDGLYQGLSTATKDTYDALHMQALPPR |

Humanized CAR7

| | | |
|---|---|---|
| SEQ ID | CAR7 | QVQLQESGPGLVKPSETLSLTCTVSGVSLPDYGVSWIRQPPG |
| NO: 1082 | scFv | KGLEWIGVIWGSETTYYSSSLKSRVTISKDNSKNQVSLKLSS |
| | domain | VTAADTAVYYCAKHYYYGGSYAMDYWGQGTLVTVSSGGG |
| | | GSGGGGSGGGGSGGGGSEIVMTQSPATLSLSPGERATLSCRA |
| | | SQDISKYLNWYQQKPGQAPRLLIYHTSRLHSGIPARFSGSGSG |
| | | TDYTLTISSLQPEDFAVYFCQQGNTLPYTFGQGTKLEIK |
| SEQ ID | CAR7 | MALPVTALLLPLALLLHAARPQVQLQESGPGLVKPSETLSLT |
| NO: 1083 | Full-aa | CTVSGVSLPDYGVSWIRQPPGKGLEWIGVIWGSETTYYSSSL |
| | | KSRVTISKDNSKNQVSLKLSSVTAADTAVYYCAKHYYYGGS |
| | | YAMDYWGQGTLVTVSSGGGGSGGGGSGGGGSGGGGSEIV |
| | | MTQSPATLSLSPGERATLSCRASQDISKYLNWYQQKPGQAPR |
| | | LLIYHTSRLHSGIPARFSGSGSGTDYTLTISSLQPEDFAVYFCQ |
| | | QGNTLPYTFGQGTKLEIKTTTPAPRPPTPAPTIASQPLSLRPEA |
| | | CRPAAGGAVHTRGLDFACDIYIWAPLAGTCGVLLLSLVITLY |
| | | CKRGRKKLLYIFKQPFMRPVQTTQEEDGCSCRFPEEEEGGCE |
| | | LRVKFSRSADAPAYKQGQNQLYNELNLGRREEYDVLDKRR |
| | | GRDPEMGGKPRRKNPQEGLYNELQKDKMAEAYSEIGMKGE |
| | | RRRGKGHDGLYQGLSTATKDTYDALHMQALPPR |

Humanized CAR8

| | | |
|---|---|---|
| SEQ ID | CAR8 | QVQLQESGPGLVKPSETLSLTCTVSGVSLPDYGVSWIRQPPG |
| NO: 1084 | scFv | KGLEWIGVIWGSETTYYQSSLKSRVTISKDNSKNQVSLKLSS |
| | domain | VTAADTAVYYCAKHYYYGGSYAMDYWGQGTLVTVSSGGG |
| | | GSGGGGSGGGGSGGGGSEIVMTQSPATLSLSPGERATLSCRA |
| | | SQDISKYLNWYQQKPGQAPRLLIYHTSRLHSGIPARFSGSGSG |
| | | TDYTLTISSLQPEDFAVYFCQQGNTLPYTFGQGTKLEIK |
| SEQ ID | CAR8- | MALPVTALLLPLALLLHAARPQVQLQESGPGLVKPSETLSLT |
| NO: 1085 | Full-aa | CTVSGVSLPDYGVSWIRQPPGKGLEWIGVIWGSETTYYQSSL |
| | | KSRVTISKDNSKNQVSLKLSSVTAADTAVYYCAKHYYYGGS |
| | | YAMDYWGQGTLVTVSSGGGGSGGGGSGGGGSGGGGSEIV |
| | | MTQSPATLSLSPGERATLSCRASQDISKYLNWYQQKPGQAPR |
| | | LLIYHTSRLHSGIPARFSGSGSGTDYTLTISSLQPEDFAVYFCQ |
| | | QGNTLPYTFGQGTKLEIKTTTPAPRPPTPAPTIASQPLSLRPEA |
| | | CRPAAGGAVHTRGLDFACDIYIWAPLAGTCGVLLLSLVITLY |
| | | CKRGRKKLLYIFKQPFMRPVQTTQEEDGCSCRFPEEEEGGCE |
| | | LRVKFSRSADAPAYKQGQNQLYNELNLGRREEYDVLDKRR |
| | | GRDPEMGGKPRRKNPQEGLYNELQKDKMAEAYSEIGMKGE |
| | | RRRGKGHDGLYQGLSTATKDTYDALHMQALPPR |

Humanized CAR9

| | | |
|---|---|---|
| SEQ ID | CAR9 | EIVMTQSPATLSLSPGERATLSCRASQDISKYLNWYQQKPGQ |
| NO: 1086 | scFv | APRLLIYHTSRLHSGIPARFSGSGSGTDYTLTISSLQPEDFAVY |
| | domain | FCQQGNTLPYTFGQGTKLEIKGGGGSGGGGSGGGGSGGGGS |
| | | QVQLQESGPGLVKPSETLSLTCTVSGVSLPDYGVSWIRQPPG |
| | | KGLEWIGVIWGSETTYYNSSLKSRVTISKDNSKNQVSLKLSS |
| | | VTAADTAVYYCAKHYYYGGSYAMDYWGQGTLVTVSS |
| SEQ ID | CAR9- | MALPVTALLLPLALLLHAARPEIVMTQSPATLSLSPGERATLS |
| NO: 1087 | Full-aa | CRASQDISKYLNWYQQKPGQAPRLLIYHTSRLHSGIPARFSG |
| | | SGSGTDYTLTISSLQPEDFAVYFCQQGNTLPYTFGQGTKLEIK |
| | | GGGGSGGGGSGGGGSGGGGSQVQLQESGPGLVKPSETLSLT |
| | | CTVSGVSLPDYGVSWIRQPPGKGLEWIGVIWGSETTYYNSSL |
| | | KSRVTISKDNSKNQVSLKLSSVTAADTAVYYCAKHYYYGGS |
| | | YAMDYWGQGTLVTVSSTTTPAPRPPTPAPTIASQPLSLRPEA |
| | | CRPAAGGAVHTRGLDFACDIYIWAPLAGTCGVLLLSLVITLY |
| | | CKRGRKKLLYIFKQPFMRPVQTTQEEDGCSCRFPEEEEGGCE |
| | | LRVKFSRSADAPAYKQGQNQLYNELNLGRREEYDVLDKRR |
| | | GRDPEMGGKPRRKNPQEGLYNELQKDKMAEAYSEIGMKGE |
| | | RRRGKGHDGLYQGLSTATKDTYDALHMQALPPR |

Humanized CAR10

| | | |
|---|---|---|
| SEQ ID | CAR10 | QVQLQESGPGLVKPSETLSLTCTVSGVSLPDYGVSWIRQPPG |
| NO: 1088 | scFv | KGLEWIGVIWGSETTYYNSSLKSRVTISKDNSKNQVSLKLSS |
| | domain | VTAADTAVYYCAKHYYYGGSYAMDYWGQGTLVTVSSGGG |
| | | GSGGGGSGGGGSGGGGSEIVMTQSPATLSLSPGERATLSCRA |
| | | SQDISKYLNWYQQKPGQAPRLLIYHTSRLHSGIPARFSGSGSG |
| | | TDYTLTISSLQPEDFAVYFCQQGNTLPYTFGQGTKLEIK |
| SEQ ID | CAR10 | MALPVTALLLPLALLLHAARPEIVMTQSPATLSLSPGERATLS |
| NO: 1089 | Full-aa | CRASQDISKYLNWYQQKPGQAPRLLIYHTSRLHSGIPARFSG |
| | | SGSGTDYTLTISSLQPEDFAVYFCQQGNTLPYTFGQGTKLEIK |
| | | GGGGSGGGGSGGGGSGGGGSQVQLQESGPGLVKPSETLSLT |
| | | CTVSGVSLPDYGVSWIRQPPGKGLEWIGVIWGSETTYYNSSL |
| | | KSRVTISKDNSKNQVSLKLSSVTAADTAVYYCAKHYYYGGS |
| | | YAMDYWGQGTLVTVSSTTTPAPRPPTPAPTIASQPLSLRPEA |
| | | CRPAAGGAVHTRGLDFACDIYIWAPLAGTCGVLLLSLVITLY |
| | | CKRGRKKLLYIFKQPFMRPVQTTQEEDGCSCRFPEEEEGGCE |
| | | LRVKFSRSADAPAYKQGQNQLYNELNLGRREEYDVLDKRR |
| | | GRDPEMGGKPRRKNPQEGLYNELQKDKMAEAYSEIGMKGE |
| | | RRRGKGHDGLYQGLSTATKDTYDALHMQALPPR |

Humanized CAR11

| | | |
|---|---|---|
| SEQ ID | CAR11 | EIVMTQSPATLSLSPGERATLSCRASQDISKYLNWYQQKPGQ |
| NO: 1090 | scFv | APRLLIYHTSRLHSGIPARFSGSGSGTDYTLTISSLQPEDFAVY |
| | domain | FCQQGNTLPYTFGQGTKLEIKGGGGSGGGGSGGGGSQVQLQ |
| | | ESGPGLVKPSETLSLTCTVSGVSLPDYGVSWIRQPPGKGLEWI |
| | | GVIWGSETTYYNSSLKSRVTISKDNSKNQVSLKLSSVTAADT |
| | | AVYYCAKHYYYGGSYAMDYWGQGTLVTVSS |
| SEQ ID | CAR11 | MALPVTALLLPLALLLHAARPQVQLQESGPGLVKPSETLSLT |
| NO: 1091 | Full-aa | CTVSGVSLPDYGVSWIRQPPGKGLEWIGVIWGSETTYYNSSL |
| | | KSRVTISKDNSKNQVSLKLSSVTAADTAVYYCAKHYYYGGS |
| | | YAMDYWGQGTLVTVSSGGGGSGGGGSGGGGSGGGGSEIV |
| | | MTQSPATLSLSPGERATLSCRASQDISKYLNWYQQKPGQAPR |
| | | LLIYHTSRLHSGIPARFSGSGSGTDYTLTISSLQPEDFAVYFCQ |
| | | QGNTLPYTFGQGTKLEIKTTTPAPRPPTPAPTIASQPLSLRPEA |
| | | CRPAAGGAVHTRGLDFACDIYIWAPLAGTCGVLLLSLVITLY |
| | | CKRGRKKLLYIFKQPFMRPVQTTQEEDGCSCRFPEEEEGGCE |
| | | LRVKFSRSADAPAYKQGQNQLYNELNLGRREEYDVLDKRR |
| | | GRDPEMGGKPRRKNPQEGLYNELQKDKMAEAYSEIGMKGE |
| | | RRRGKGHDGLYQGLSTATKDTYDALHMQALPPR |

Humanized CAR12

| | | |
|---|---|---|
| SEQ ID | CAR12 | QVQLQESGPGLVKPSETLSLTCTVSGVSLPDYGVSWIRQPPG |
| NO: 1092 | scFv | KGLEWIGVIWGSETTYYNSSLKSRVTISKDNSKNQVSLKLSS |
| | domain | VTAADTAVYYCAKHYYYGGSYAMDYWGQGTLVTVSSGGG |
| | | GSGGGGSGGGGSEIVMTQSPATLSLSPGERATLSCRASQDISK |
| | | YLNWYQQKPGQAPRLLIYHTSRLHSGIPARFSGSGSGTDYTL |
| | | TISSLQPEDFAVYFCQQGNTLPYTFGQGTKLEIK |
| SEQ ID | CAR12- | MALPVTALLLPLALLLHAARPEIVMTQSPATLSLSPGERATLS |
| NO: 1093 | Full-aa | CRASQDISKYLNWYQQKPGQAPRLLIYHTSRLHSGIPARFSG |
| | | SGSGTDYTLTISSLQPEDFAVYFCQQGNTLPYTFGQGTKLEIK |
| | | GGGGSGGGGSGGGGSQVQLQESGPGLVKPSETLSLTCTVSG |
| | | VSLPDYGVSWIRQPPGKGLEWIGVIWGSETTYYNSSLKSRVT |
| | | ISKDNSKNQVSLKLSSVTAADTAVYYCAKHYYYGGSYAMD |
| | | YWGQGTLVTVSSTTTPAPRPPTPAPTIASQPLSLRPEACRPAA |
| | | GGAVHTRGLDFACDIYIWAPLAGTCGVLLLSLVITLYCKRGR |
| | | KKLLYIFKQPFMRPVQTTQEEDGCSCRFPEEEEGGCELRVKF |
| | | SRSADAPAYKQGQNQLYNELNLGRREEYDVLDKRRGRDPE |
| | | MGGKPRRKNPQEGLYNELQKDKMAEAYSEIGMKGERRRGK |
| | | GHDGLYQGLSTATKDTYDALHMQALPPR |

Murine CART19

| | | |
|---|---|---|
| SEQ ID | HCDR1 | DYGVS |
| NO: 1094 | (Kabat) | |
| SEQ ID | HCDR2 | VIWGSETTYYNSALKS |
| NO: 1095 | (Kabat) | |
| SEQ ID | HCDR3 | HYYYGGSYAMDY |
| NO: 1096 | (Kabat) | |
| SEQ ID | LCDR1 | RASQDISKYLN |
| NO: 1097 | (Kabat) | |
| SEQ ID | LCDR2 | HTSRLHS |
| NO: 1098 | (Kabat) | |
| SEQ ID | LCDR3 | QQGNTLPYT |
| NO: 1099 | (Kabat) | |

Humanized CART19 a

| | | |
|---|---|---|
| SEQ ID | HCDR1 | DYGVS |
| NO: 1100 | (Kabat) | |
| SEQ ID | HCDR2 | VIWGSETTYYSSSLKS |
| NO: 1101 | (Kabat) | |
| SEQ ID | HCDR3 | HYYYGGSYAMDY |
| NO: 1102 | (Kabat) | |
| SEQ ID | LCDR1 | RASQDISKYLN |
| NO: 1103 | (Kabat) | |
| SEQ ID | LCDR2 | HTSRLHS |
| NO: 1104 | (Kabat) | |
| SEQ ID | LCDR3 | QQGNTLPYT |
| NO: 1105 | (Kabat) | |

Humanized CART19 b

| | | |
|---|---|---|
| SEQ ID | HCDR1 | DYGVS |
| NO: 1106 | (Kabat) | |
| SEQ ID | HCDR2 | VIWGSETTYYQSSLKS |
| NO: 1107 | (Kabat) | |
| SEQ ID | HCDR3 | HYYYGGSYAMDY |
| NO: 1108 | (Kabat) | |
| SEQ ID | LCDR1 | RASQDISKYLN |
| NO: 1109 | (Kabat) | |
| SEQ ID | LCDR2 | HTSRLHS |
| NO: 1110 | (Kabat) | |
| SEQ ID | LCDR3 | QQGNTLPYT |
| NO: 1111 | (Kabat) | |

Humanized CART19 c

| | | |
|---|---|---|
| SEQ ID | HCDR1 | DYGVS |
| NO: 1112 | (Kabat) | |
| SEQ ID | HCDR2 | VIWGSETTYYNSSLKS |
| NO: 1113 | (Kabat) | |
| SEQ ID | HCDR3 | HYYYGGSYAMDY |
| NO: 1114 | (Kabat) | |
| SEQ ID | LCDR1 | RASQDISKYLN |
| NO: 1115 | (Kabat) | |
| SEQ ID | LCDR2 | HTSRLHS |
| NO: 1116 | (Kabat) | |
| SEQ ID | LCDR3 | QQGNTLPYT |
| NO: 1117 | (Kabat) | |

[0396] CD19 CAR constructs containing humanized anti-CD19 scFv domains are described in PCT publication WO 2014/153270, incorporated herein by reference.

[0397] The sequences of murine and humanized CDR sequences of the anti-CD19 scFv domains are shown in Table 12 for the heavy chain variable domains and in Table 13 for the light chain variable domains. The SEQ ID NOs refer to those found in Table 11.

TABLE 12
Heavy Chain Variable Domain CDR (Kabat) SEQ ID NO’s of CD19 Antibodies

| Candidate | HCDR1 | HCDR2 | HCDR3 |
|---|---|---|---|
| murine_CART19 | SEQ ID NO: 1094 | SEQ ID NO: 1095 | SEQ ID NO: 1096 |
| humanized_CART19 a | SEQ ID NO: 1100 | SEQ ID NO: 1101 | SEQ ID NO: 1102 |
| humanized_CART19 b | SEQ ID NO: 1106 | SEQ ID NO: 1107 | SEQ ID NO: 1108 |
| humanized_CART19 c | SEQ ID NO: 1112 | SEQ ID NO: 1113 | SEQ ID NO: 1114 |

TABLE 13
Light Chain Variable Domain CDR (Kabat) SEQ ID NO’s of CD19 Antibodies

| Candidate | LCDR1 | LCDR2 | LCDR3 |
|---|---|---|---|
| murine_CART19 | SEQ ID NO: 1097 | SEQ ID NO: 1098 | SEQ ID NO: 1099 |
| humanized_CART19 a | SEQ ID NO: 1103 | SEQ ID NO: 1104 | SEQ ID NO: 1105 |
| humanized_CART19 b | SEQ ID NO: 1109 | SEQ ID NO: 1110 | SEQ ID NO: 1111 |
| humanized_CART19 c | SEQ ID NO: 1115 | SEQ ID NO: 1116 | SEQ ID NO: 1117 |

[0398] Any known CD19 CAR, e.g., the CD19 antigen binding domain of any known CD19 CAR, in the art can be used in accordance with the present disclosure. For example, LG-740; CD19 CAR described in the U.S. Pat. Nos. 8,399,645; 7,446,190; Xu et al., Leuk Lymphoma. 2013 54(2):255-260(2012); Cruz et al., Blood 122(17):2965-2973 (2013); Brentjens et al., Blood, 118(18):4817-4828 (2011); Kochenderfer et al., Blood 116(20):4099-102 (2010); Kochenderfer et al., Blood 122 (25):4129-39(2013); and 16th Annu Meet Am Soc Gen Cell Ther (ASGCT) (May 15-18, Salt Lake City) 2013, Abst 10.

[0399] Exemplary CD19 CARs include CD19 CARs described herein, e.g., in one or more tables described herein, or an anti-CD19 CAR described in Xu et al. Blood 123.24(2014):3750-9; Kochenderfer et al. Blood 122.25(2013):4129-39, Cruz et al. Blood 122.17(2013):2965-73, NCT00586391, NCT01087294, NCT02456350, NCT00840853, NCT02659943, NCT02650999, NCT02640209, NCT01747486, NCT02546739, NCT02656147, NCT02772198, NCT00709033, NCT02081937, NCT00924326, NCT02735083, NCT02794246, NCT02746952, NCT01593696, NCT02134262, NCT01853631, NCT02443831, NCT02277522, NCT02348216, NCT02614066, NCT02030834, NCT02624258, NCT02625480, NCT02030847, NCT02644655, NCT02349698, NCT02813837, NCT02050347, NCT01683279, NCT02529813, NCT02537977, NCT02799550, NCT02672501, NCT02819583, NCT02028455, NCT01840566, NCT01318317, NCT01864889, NCT02706405, NCT01475058, NCT01430390, NCT02146924, NCT02051257, NCT02431988, NCT01815749, NCT02153580, NCT01865617, NCT02208362, NCT02685670, NCT02535364, NCT02631044, NCT02728882, NCT02735291, NCT01860937, NCT02822326, NCT02737085, NCT02465983, NCT02132624, NCT02782351, NCT01493453, NCT02652910, NCT02247609, NCT01029366, NCT01626495, NCT02721407, NCT01044069, NCT00422383, NCT01680991, NCT02794961, or NCT02456207, each of which is incorporated herein by reference in its entirety.

### BCMA CAR and BCMA-Binding Sequences

[0400] In some embodiments, the TOX^{hi} CAR cell described herein is a BCMA CAR-expressing cell (e.g., a cell expressing a CAR that binds to human BCMA). Exemplary BCMA CARs can include sequences disclosed in Table 1 or 16 of WO2016/014565, incorporated herein by reference. The BCMA CAR construct can include an optional leader sequence; an optional hinge domain, e.g., a CD8 hinge domain; a transmembrane domain, e.g., a CD8 transmembrane domain; an intracellular domain, e.g., a 4-1BB intracellular domain; and a functional signaling domain, e.g., a CD3 zeta domain. In some embodiments, the domains are contiguous and in the same reading frame to form a single fusion protein. In other embodiments, the domain are in separate polypeptides, e.g., as in an RCAR molecule as described herein.

[0401] The sequences of exemplary BCMA CAR molecules or fragments thereof are disclosed in Tables 14, 15, 16, and 17. In some embodiments, the full length BCMA CAR molecule includes one or more CDRs, VH, VL, scFv, or full-length sequences of, BCMA-1, BCMA-2, BCMA-3, BCMA-4, BCMA-5, BCMA-6, BCMA-7, BCMA-8, BCMA-9, BCMA-10, BCMA-11, BCMA-12, BCMA-13, BCMA-14, BCMA-15, 149362, 149363, 149364, 149365, 149366, 149367, 149368, 149369, BCMA_EBB-C1978-A4, BCMA_EBB-C1978-G1, BCMA_EBB-C1979-C1, BCMA_EBB-C1978-C7, BCMA_EBB-C1978-D10, BCMA_EBB-C1979-C12, BCMA_EBB-C1980-G4, BCMA_EBB-C1980-D2, BCMA_EBB-C1978-A10, BCMA_EBB-C1978-D4, BCMA_EBB-C1980-A2, BCMA_EBB-C1981-C3, BCMA_EBB-C1978-G4, A7D12.2, C11D5.3, C12A3.2, or C13F12.1, as disclosed in Tables U, V, W, and X, or a sequence substantially (e.g., 95-99%) identical thereto.

[0402] Additional exemplary BCMA-targeting sequences that can be used in the anti-BCMA CAR constructs are disclosed in WO 2017/021450, WO 2017/011804, WO 2017/025038, WO 2016/090327, WO 2016/130598, WO 2016/210293, WO 2016/090320, WO 2016/014789, WO 2016/094304, WO 2016/154055, WO 2015/166073, WO 2015/188119, WO 2015/158671, U.S. Pat. Nos. 9,243,058, 8,920,776, 9,273,141, 7,083,785, 9,034,324, US 2007/0049735, US 2015/0284467, US 2015/0051266, US 2015/0344844, US 2016/0131655, US 2016/0297884, US 2016/0297885, US 2017/0051308, US 2017/0051252, US 2017/0051252, WO 2016/020332, WO 2016/087531, WO 2016/079177, WO 2015/172800, WO 2017/008169, U.S. Pat. No. 9,340,621, US 2013/0273055, US 2016/0176973, US 2015/0368351, US 2017/0051068, US 2016/0368988, and US 2015/0232557, herein incorporated by reference in their entirety. In some embodiments, additional exemplary BCMA CAR constructs are generated using the VH and VL sequences from PCT Publication WO2012/0163805 (the contents of which are hereby incorporated by reference in its entirety).

TABLE 14
Amino Acid and Nucleic Acid Sequences of exemplary anti-BCMA scFv domains
and BCMA CAR molecules. The amino acid sequences variable heavy chain
and variable light chain sequences for each scFv is also provided.

| | | |
|---|---|---|
| | SEQ | |
| Name/ | ID | |
| Description | NO: | Sequence |

139109

| | | |
|---|---|---|
| 139109- aa | 49 | EVQLVESGGGLVQPGGSLRLSCAVSGFALSNHGMSWVRRAPGK |
| ScFv | | GLEWVSGIVYSGSTYYAASVKGRFTISRDNSRNTLYLQMNSLRP |
| domain | | EDTAIYYCSAHGGESDVWGQGTTVTVSSASGGGGSGGRASGGG |
| | | GSDIQLTQSPSSLSASVGDRVTITCRASQSISSYLNWYQQKPGKA |
| | | PKLLIYAASSLQSGVPSRFSGSGSGTDFTLTISSLQPEDFATYYCQ |
| | | QSYSTPYTFGQGTKVEIK |
| 139109- nt | 64 | GAAGTGCAATTGGTGGAATCAGGGGGAGGACTTGTGCAGCCT |
| ScFv | | GGAGGATCGCTGAGACTGTCATGTGCCGTGTCCGGCTTTGCCC |
| domain | | TGTCCAACCACGGGATGTCCTGGGTCCGCCGCGCGCCTGGAA |
| | | AGGGCCTCGAATGGGTGTCGGGTATTGTGTACAGCGGTAGCA |
| | | CCTACTATGCCGCATCCGTGAAGGGGAGATTCACCATCAGCC |
| | | GGGACAACTCCAGGAACACTCTGTACCTCCAAATGAATTCGC |
| | | TGAGGCCAGAGGACACTGCCATCTACTACTGCTCCGCGCATG |
| | | GCGGAGAGTCCGACGTCTGGGGACAGGGGACCACCGTGACC |
| | | GTGTCTAGCGCGTCCGGCGGAGGCGGCAGCGGGGGTCGGGCA |
| | | TCAGGGGGCGGCGGATCGGACATCCAGCTCACCCAGTCCCCG |
| | | AGCTCGCTGTCCGCCTCCGTGGGAGATCGGGTCACCATCACG |
| | | TGCCGCGCCAGCCAGTCGATTTCCTCCTACCTGAACTGGTACC |
| | | AACAGAAGCCCGGAAAAGCCCCGAAGCTTCTCATCTACGCCG |
| | | CCTCGAGCCTGCAGTCAGGAGTGCCCTCACGGTTCTCCGGCTC |
| | | CGGTTCCGGTACTGATTTCACCCTGACCATTTCCTCCCTGCAA |
| | | CCGGAGGACTTCGCTACTTACTACTGCCAGCAGTCGTACTCCA |
| | | CCCCCTACACTTTCGGACAAGGCACCAAGGTCGAAATCAAG |
| 139109- aa | 79 | EVQLVESGGGLVQPGGSLRLSCAVSGFALSNHGMSWVRRAPGK |
| VH | | GLEWVSGIVYSGSTYYAASVKGRFTISRDNSRNTLYLQMNSLRP |
| | | EDTAIYYCSAHGGESDVWGQGTTVTVSS |
| 139109- aa | 94 | DIQLTQSPSSLSASVGDRVTITCRASQSISSYLNWYQQKPGKAPK |
| VL | | LLIYAASSLQSGVPSRFSGSGSGTDFTLTISSLQPEDFATYYCQQS |
| | | YSTPYTFGQGTKVEIK |
| 139109- aa | 109 | MALPVTALLLPLALLLHAARPEVQLVESGGGLVQPGGSLRLSCA |
| Full CAR | | VSGFALSNHGMSWVRRAPGKGLEWVSGIVYSGSTYYAASVKGR |
| | | FTISRDNSRNTLYLQMNSLRPEDTAIYYCSAHGGESDVWGQGTT |
| | | VTVSSASGGGGSGGRASGGGGSDIQLTQSPSSLSASVGDRVTITC |
| | | RASQSISSYLNWYQQKPGKAPKLLIYAASSLQSGVPSRFSGSGSG |
| | | TDFTLTISSLQPEDFATYYCQQSYSTPYTFGQGTKVEIKTTTPAPR |
| | | PPTPAPTIASQPLSLRPEACRPAAGGAVHTRGLDFACDIYIWAPL |
| | | AGTCGVLLLSLVITLYCKRGRKKLLYIFKQPFMRPVQTTQEEDG |
| | | CSCRFPEEEEGGCELRVKFSRSADAPAYKQGQNQLYNELNLGRR |
| | | EEYDVLDKRRGRDPEMGGKPRRKNPQEGLYNELQKDKMAEAY |
| | | SEIGMKGERRRGKGHDGLYQGLSTATKDTYDALHMQALPPR |
| 139109- nt | 124 | ATGGCCCTCCCTGTCACCGCCCTGCTGCTTCCGCTGGCTCTTC |
| Full CAR | | TGCTCCACGCCGCTCGGCCCGAAGTGCAATTGGTGGAATCAG |
| | | GGGGAGGACTTGTGCAGCCTGGAGGATCGCTGAGACTGTCAT |
| | | GTGCCGTGTCCGGCTTTGCCCTGTCCAACCACGGGATGTCCTG |
| | | GGTCCGCCGCGCGCCTGGAAAGGGCCTCGAATGGGTGTCGGG |
| | | TATTGTGTACAGCGGTAGCACCTACTATGCCGCATCCGTGAA |
| | | GGGGAGATTCACCATCAGCCGGGACAACTCCAGGAACACTCT |
| | | GTACCTCCAAATGAATTCGCTGAGGCCAGAGGACACTGCCAT |
| | | CTACTACTGCTCCGCGCATGGCGGAGAGTCCGACGTCTGGGG |
| | | ACAGGGGACCACCGTGACCGTGTCTAGCGCGTCCGGCGGAGG |
| | | CGGCAGCGGGGGTCGGGCATCAGGGGGCGGCGGATCGGACA |
| | | TCCAGCTCACCCAGTCCCCGAGCTCGCTGTCCGCCTCCGTGGG |
| | | AGATCGGGTCACCATCACGTGCCGCGCCAGCCAGTCGATTTC |
| | | CTCCTACCTGAACTGGTACCAACAGAAGCCCGGAAAAGCCCC |
| | | GAAGCTTCTCATCTACGCCGCCTCGAGCCTGCAGTCAGGAGT |
| | | GCCCTCACGGTTCTCCGGCTCCGGTTCCGGTACTGATTTCACC |
| | | CTGACCATTTCCTCCCTGCAACCGGAGGACTTCGCTACTTACT |
| | | ACTGCCAGCAGTCGTACTCCACCCCCTACACTTTCGGACAAG |
| | | GCACCAAGGTCGAAATCAAGACCACTACCCCAGCACCGAGGC |
| | | CACCCACCCCGGCTCCTACCATCGCCTCCCAGCCTCTGTCCCT |
| | | GCGTCCGGAGGCATGTAGACCCGCAGCTGGTGGGGCCGTGCA |
| | | TACCCGGGGTCTTGACTTCGCCTGCGATATCTACATTTGGGCC |
| | | CCTCTGGCTGGTACTTGCGGGGTCCTGCTGCTTTCACTCGTGA |
| | | TCACTCTTTACTGTAAGCGCGGTCGGAAGAAGCTGCTGTACAT |
| | | CTTTAAGCAACCCTTCATGAGGCCTGTGCAGACTACTCAAGA |
| | | GGAGGACGGCTGTTCATGCCGGTTCCCAGAGGAGGAGGAAG |
| | | GCGGCTGCGAACTGCGCGTGAAATTCAGCCGCAGCGCAGATG |
| | | CTCCAGCCTACAAGCAGGGGCAGAACCAGCTCTACAACGAAC |
| | | TCAATCTTGGTCGGAGAGAGGAGTACGACGTGCTGGACAAGC |
| | | GGAGAGGACGGGACCCAGAAATGGGCGGGAAGCCGCGCAGA |
| | | AAGAATCCCCAAGAGGGCCTGTACAACGAGCTCCAAAAGGAT |
| | | AAGATGGCAGAAGCCTATAGCGAGATTGGTATGAAAGGGGA |
| | | ACGCAGAAGAGGCAAAGGCCACGACGGACTGTACCAGGGAC |
| | | TCAGCACCGCCACCAAGGACACCTATGACGCTCTTCACATGC |
| | | AGGCCCTGCCGCCTCGG |
| Full CAR | 392 | EVQLVESGGGLVQPGGSLRLSCAVSGFALSNHGMSWVRRAPGK |
| without | | GLEWVSGIVYSGSTYYAASVKGRFTISRDNSRNTLYLQMNSLRP |
| leader | | EDTAIYYCSAHGGESDVWGQGTTVTVSSASGGGGSGGRASGGG |
| sequence | | GSDIQLTQSPSSLSASVGDRVTITCRASQSISSYLNWYQQKPGKA |
| | | PKLLIYAASSLQSGVPSRFSGSGSGTDFTLTISSLQPEDFATYYCQ |
| | | QSYSTPYTFGQGTKVEIKTTTPAPRPPTPAPTIASQPLSLRPEACRP |
| | | AAGGAVHTRGLDFACDIYIWAPLAGTCGVLLLSLVITLYCKRGR |
| | | KKLLYIFKQPFMRPVQTTQEEDGCSCRFPEEEEGGCELRVKFSRS |
| | | ADAPAYKQGQNQLYNELNLGRREEYDVLDKRRGRDPEMGGKP |
| | | RRKNPQEGLYNELQKDKMAEAYSEIGMKGERRRGKGHDGLYQ |
| | | GLSTATKDTYDALHMQALPPR |
| Full CAR | 393 | EVQLVESGGGLVQPGGSLRLSCAVSGFALSNHGMSWVRRAPGK |
| without | | GLEWVSGIVYSGSTYYAASVKGRFTISRDNSRNTLYLQMNSLRP |
| linker, | | EDTAIYYCSAHGGESDVWGQGTTVTVSSDIQLTQSPSSLSASVG |
| without | | DRVTITCRASQSISSYLNWYQQKPGKAPKLLIYAASSLQSGVPSR |
| leader | | FSGSGSGTDFTLTISSLQPEDFATYYCQQSYSTPYTFGQGTKVEIK |
| sequence | | TTTPAPRPPTPAPTIASQPLSLRPEACRPAAGGAVHTRGLDFACDI |
| | | YIWAPLAGTCGVLLLSLVITLYCKRGRKKLLYIFKQPFMRPVQTT |
| | | QEEDGCSCRFPEEEEGGCELRVKFSRSADAPAYKQGQNQLYNEL |
| | | NLGRREEYDVLDKRRGRDPEMGGKPRRKNPQEGLYNELQKDK |
| | | MAEAYSEIGMKGERRRGKGHDGLYQGLSTATKDTYDALHMQA |
| | | LPPR |

139103

| | | |
|---|---|---|
| 139103- aa | 39 | QVQLVESGGGLVQPGRSLRLSCAASGFTFSNYAMSWVRQAPGK |
| ScFv | | GLGWVSGISRSGENTYYADSVKGRFTISRDNSKNTLYLQMNSLR |
| domain | | DEDTAVYYCARSPAHYYGGMDVWGQGTTVTVSSASGGGGSGG |
| | | RAS GGGGSDIVLTQSPGTLSLSPGERATLSCRASQSISSSFLAWYQ |
| | | QKPGQAPRLLIYGASRRATGIPDRFSGSGSGTDFTLTISRLEPEDS |
| | | AVYYCQQYHSSPSWTFGQGTKLEIK |
| 139103- nt | 54 | CAAGTGCAACTCGTGGAATCTGGTGGAGGACTCGTGCAACCC |
| ScFv | | GGAAGATCGCTTAGACTGTCGTGTGCCGCCAGCGGGTTCACT |
| domain | | TTCTCGAACTACGCGATGTCCTGGGTCCGCCAGGCACCCGGA |
| | | AAGGGACTCGGTTGGGTGTCCGGCATTTCCCGGTCCGGCGAA |
| | | AATACCTACTACGCCGACTCCGTGAAGGGCCGCTTCACCATCT |
| | | CAAGGGACAACAGCAAAAACACCCTGTACTTGCAAATGAACT |
| | | CCCTGCGGGATGAAGATACAGCCGTGTACTATTGCGCCCGGT |
| | | CGCCTGCCCATTACTACGGCGGAATGGACGTCTGGGGACAGG |
| | | GAACCACTGTGACTGTCAGCAGCGCGTCGGGTGGCGGCGGCT |
| | | CAGGGGGTCGGGCCTCCGGGGGGGGAGGGTCCGACATCGTGC |
| | | TGACCCAGTCCCCGGGAACCCTGAGCCTGAGCCCGGGAGAGC |
| | | GCGCGACCCTGTCATGCCGGGCATCCCAGAGCATTAGCTCCT |
| | | CCTTTCTCGCCTGGTATCAGCAGAAGCCCGGACAGGCCCCGA |
| | | GGCTGCTGATCTACGGCGCTAGCAGAAGGGCTACCGGAATCC |
| | | CAGACCGGTTCTCCGGCTCCGGTTCCGGGACCGATTTCACCCT |
| | | TACTATCTCGCGCCTGGAACCTGAGGACTCCGCCGTCTACTAC |
| | | TGCCAGCAGTACCACTCATCCCCGTCGTGGACGTTCGGACAG |
| | | GGCACCAAGCTGGAGATTAAG |
| 139103- AA | 69 | QVQLVESGGGLVQPGRSLRLSCAASGFTFSNYAMSWVRQAPGK |
| VH | | GLGWVSGISRSGENTYYADSVKGRFTISRDNSKNTLYLQMNSLR |
| | | DEDTAVYYCARSPAHYYGGMDVWGQGTTVTVSS |
| 139103- aa | 84 | DIVLTQSPGTLSLSPGERATLSCRASQSISSSFLAWYQQKPGQAPR |
| VL | | LLIYGASRRATGIPDRFSGSGSGTDFTLTISRLEPEDSAVYYCQQY |
| | | HSSPSWTFGQGTKLEIK |
| 139103- aa | 99 | MALPVTALLLPLALLLHAARPQVQLVESGGGLVQPGRSLRLSCA |
| Full CAR | | ASGFTFSNYAMSWVRQAPGKGLGWVSGISRSGENTYYADSVKG |
| | | RFTISRDNSKNTLYLQMNSLRDEDTAVYYCARSPAHYYGGMDV |
| | | WGQGTTVTVSSASGGGGSGGRASGGGGSDIVLTQSPGTLSLSPG |
| | | ERATLSCRASQSISSSFLAWYQQKPGQAPRLLIYGASRRATGIPD |
| | | RFSGSGSGTDFTLTISRLEPEDSAVYYCQQYHSSPSWTFGQGTKL |
| | | EIKTTTPAPRPPTPAPTIASQPLSLRPEACRPAAGGAVHTRGLDFA |
| | | CDIYIWAPLAGTCGVLLLSLVITLYCKRGRKKLLYIFKQPFMRPV |
| | | QTTQEEDGCSCRFPEEEEGGCELRVKFSRSADAPAYKQGQNQLY |
| | | NELNLGRREEYDVLDKRRGRDPEMGGKPRRKNPQEGLYNELQK |
| | | DKMAEAYSEIGMKGERRRGKGHDGLYQGLSTATKDTYDALHM |
| | | QALPPR |
| 139103- nt | 114 | ATGGCCCTCCCTGTCACCGCCCTGCTGCTTCCGCTGGCTCTTC |
| Full CAR | | TGCTCCACGCCGCTCGGCCCCAAGTGCAACTCGTGGAATCTG |
| | | GTGGAGGACTCGTGCAACCCGGAAGATCGCTTAGACTGTCGT |
| | | GTGCCGCCAGCGGGTTCACTTTCTCGAACTACGCGATGTCCTG |
| | | GGTCCGCCAGGCACCCGGAAAGGGACTCGGTTGGGTGTCCGG |
| | | CATTTCCCGGTCCGGCGAAAATACCTACTACGCCGACTCCGTG |
| | | AAGGGCCGCTTCACCATCTCAAGGGACAACAGCAAAAACACC |
| | | CTGTACTTGCAAATGAACTCCCTGCGGGATGAAGATACAGCC |
| | | GTGTACTATTGCGCCCGGTCGCCTGCCCATTACTACGGCGGAA |
| | | TGGACGTCTGGGGACAGGGAACCACTGTGACTGTCAGCAGCG |
| | | CGTCGGGTGGCGGCGGCTCAGGGGGTCGGGCCTCCGGGGGGG |
| | | GAGGGTCCGACATCGTGCTGACCCAGTCCCCGGGAACCCTGA |
| | | GCCTGAGCCCGGGAGAGCGCGCGACCCTGTCATGCCGGGCAT |
| | | CCCAGAGCATTAGCTCCTCCTTTCTCGCCTGGTATCAGCAGAA |
| | | GCCCGGACAGGCCCCGAGGCTGCTGATCTACGGCGCTAGCAG |
| | | AAGGGCTACCGGAATCCCAGACCGGTTCTCCGGCTCCGGTTC |
| | | CGGGACCGATTTCACCCTTACTATCTCGCGCCTGGAACCTGAG |
| | | GACTCCGCCGTCTACTACTGCCAGCAGTACCACTCATCCCCGT |
| | | CGTGGACGTTCGGACAGGGCACCAAGCTGGAGATTAAGACCA |
| | | CTACCCCAGCACCGAGGCCACCCACCCCGGCTCCTACCATCG |
| | | CCTCCCAGCCTCTGTCCCTGCGTCCGGAGGCATGTAGACCCGC |
| | | AGCTGGTGGGGCCGTGCATACCCGGGGTCTTGACTTCGCCTG |
| | | CGATATCTACATTTGGGCCCCTCTGGCTGGTACTTGCGGGGTC |
| | | CTGCTGCTTTCACTCGTGATCACTCTTTACTGTAAGCGCGGTC |
| | | GGAAGAAGCTGCTGTACATCTTTAAGCAACCCTTCATGAGGC |
| | | CTGTGCAGACTACTCAAGAGGAGGACGGCTGTTCATGCCGGT |
| | | TCCCAGAGGAGGAGGAAGGCGGCTGCGAACTGCGCGTGAAA |
| | | TTCAGCCGCAGCGCAGATGCTCCAGCCTACAAGCAGGGGCAG |
| | | AACCAGCTCTACAACGAACTCAATCTTGGTCGGAGAGAGGAG |
| | | TACGACGTGCTGGACAAGCGGAGAGGACGGGACCCAGAAAT |
| | | GGGCGGGAAGCCGCGCAGAAAGAATCCCCAAGAGGGCCTGT |
| | | ACAACGAGCTCCAAAAGGATAAGATGGCAGAAGCCTATAGC |
| | | GAGATTGGTATGAAAGGGGAACGCAGAAGAGGCAAAGGCCA |
| | | CGACGGACTGTACCAGGGACTCAGCACCGCCACCAAGGACAC |
| | | CTATGACGCTCTTCACATGCAGGCCCTGCCGCCTCGG |

139105

| | | |
|---|---|---|
| 139105- aa | 40 | QVQLVESGGGLVQPGRSLRLSCAASGFTFDDYAMHWVRQAPG |
| ScFv | | KGLEWVSGISWNSGSIGYADSVKGRFTISRDNAKNSLYLQMNSL |
| domain | | RAEDTALYYCSVHSFLAYWGQGTLVTVSSASGGGGSGGRASGG |
| | | GGSDIVMTQTPLSLPVTPGEPASISCRSSQSLLHSNGYNYLDWYL |
| | | QKPGQSPQLLIYLGSNRASGVPDRFSGSGSGTDFTLKISRVEAED |
| | | VGVYYCMQALQTPYTFGQGTKVEIK |
| 139105- nt | 55 | CAAGTGCAACTCGTCGAATCCGGTGGAGGTCTGGTCCAACCT |
| ScFv | | GGTAGAAGCCTGAGACTGTCGTGTGCGGCCAGCGGATTCACC |
| domain | | TTTGATGACTATGCTATGCACTGGGTGCGGCAGGCCCCAGGA |
| | | AAGGGCCTGGAATGGGTGTCGGGAATTAGCTGGAACTCCGGG |
| | | TCCATTGGCTACGCCGACTCCGTGAAGGGCCGCTTCACCATCT |
| | | CCCGCGACAACGCAAAGAACTCCCTGTACTTGCAAATGAACT |
| | | CGCTCAGGGCTGAGGATACCGCGCTGTACTACTGCTCCGTGC |
| | | ATTCCTTCCTGGCCTACTGGGGACAGGGAACTCTGGTCACCGT |
| | | GTCGAGCGCCTCCGGCGGCGGGGGCTCGGGTGGACGGGCCTC |
| | | GGGCGGAGGGGGGTCCGACATCGTGATGACCCAGACCCCGCT |
| | | GAGCTTGCCCGTGACTCCCGGAGAGCCTGCATCCATCTCCTGC |
| | | CGGTCATCCCAGTCCCTTCTCCACTCCAACGGATACAACTACC |
| | | TCGACTGGTACCTCCAGAAGCCGGGACAGAGCCCTCAGCTTC |
| | | TGATCTACCTGGGGTCAAATAGAGCCTCAGGAGTGCCGGATC |
| | | GGTTCAGCGGATCTGGTTCGGGAACTGATTTCACTCTGAAGAT |
| | | TTCCCGCGTGGAAGCCGAGGACGTGGGCGTCTACTACTGTAT |
| | | GCAGGCGCTGCAGACCCCCTATACCTTCGGCCAAGGGACGAA |
| | | AGTGGAGATCAAG |
| 139105- aa | 70 | QVQLVESGGGLVQPGRSLRLSCAASGFTFDDYAMHWVRQAPG |
| VH | | KGLEWVSGISWNSGSIGYADSVKGRFTISRDNAKNSLYLQMNSL |
| | | RAEDTALYYCSVHSFLAYWGQGTLVTVSS |
| 139105- aa | 85 | DIVMTQTPLSLPVTPGEPASISCRSSQSLLHSNGYNYLDWYLQKP |
| VL | | GQSPQLLIYLGSNRASGVPDRFSGSGSGTDFTLKISRVEAEDVGV |
| | | YYCMQALQTPYTFGQGTKVEIK |
| 139105- aa | 100 | MALPVTALLLPLALLLHAARPQVQLVESGGGLVQPGRSLRLSCA |
| Full CAR | | ASGFTFDDYAMHWVRQAPGKGLEWVSGISWNSGSIGYADSVK |
| | | GRFTISRDNAKNSLYLQMNSLRAEDTALYYCSVHSFLAYWGQG |
| | | TLVTVSSASGGGGSGGRASGGGGSDIVMTQTPLSLPVTPGEPASI |
| | | SCRSSQSLLHSNGYNYLDWYLQKPGQSPQLLIYLGSNRASGVPD |
| | | RFSGSGSGTDFTLKISRVEAEDVGVYYCMQALQTPYTFGQGTKV |
| | | EIKTTTPAPRPPTPAPTIASQPLSLRPEACRPAAGGAVHTRGLDFA |
| | | CDIYIWAPLAGTCGVLLLSLVITLYCKRGRKKLLYIFKQPFMRPV |
| | | QTTQEEDGCSCRFPEEEEGGCELRVKFSRSADAPAYKQGQNQLY |
| | | NELNLGRREEYDVLDKRRGRDPEMGGKPRRKNPQEGLYNELQK |
| | | DKMAEAYSEIGMKGERRRGKGHDGLYQGLSTATKDTYDALHM |
| | | QALPPR |
| 139105- nt | 115 | ATGGCCCTCCCTGTCACCGCCCTGCTGCTTCCGCTGGCTCTTC |
| Full CAR | | TGCTCCACGCCGCTCGGCCCCAAGTGCAACTCGTCGAATCCG |
| | | GTGGAGGTCTGGTCCAACCTGGTAGAAGCCTGAGACTGTCGT |
| | | GTGCGGCCAGCGGATTCACCTTTGATGACTATGCTATGCACTG |
| | | GGTGCGGCAGGCCCCAGGAAAGGGCCTGGAATGGGTGTCGG |
| | | GAATTAGCTGGAACTCCGGGTCCATTGGCTACGCCGACTCCG |
| | | TGAAGGGCCGCTTCACCATCTCCCGCGACAACGCAAAGAACT |
| | | CCCTGTACTTGCAAATGAACTCGCTCAGGGCTGAGGATACCG |
| | | CGCTGTACTACTGCTCCGTGCATTCCTTCCTGGCCTACTGGGG |
| | | ACAGGGAACTCTGGTCACCGTGTCGAGCGCCTCCGGCGGCGG |
| | | GGGCTCGGGTGGACGGGCCTCGGGCGGAGGGGGGTCCGACA |
| | | TCGTGATGACCCAGACCCCGCTGAGCTTGCCCGTGACTCCCG |
| | | GAGAGCCTGCATCCATCTCCTGCCGGTCATCCCAGTCCCTTCT |
| | | CCACTCCAACGGATACAACTACCTCGACTGGTACCTCCAGAA |
| | | GCCGGGACAGAGCCCTCAGCTTCTGATCTACCTGGGGTCAAA |
| | | TAGAGCCTCAGGAGTGCCGGATCGGTTCAGCGGATCTGGTTC |
| | | GGGAACTGATTTCACTCTGAAGATTTCCCGCGTGGAAGCCGA |
| | | GGACGTGGGCGTCTACTACTGTATGCAGGCGCTGCAGACCCC |
| | | CTATACCTTCGGCCAAGGGACGAAAGTGGAGATCAAGACCAC |
| | | TACCCCAGCACCGAGGCCACCCACCCCGGCTCCTACCATCGC |
| | | CTCCCAGCCTCTGTCCCTGCGTCCGGAGGCATGTAGACCCGCA |
| | | GCTGGTGGGGCCGTGCATACCCGGGGTCTTGACTTCGCCTGC |
| | | GATATCTACATTTGGGCCCCTCTGGCTGGTACTTGCGGGGTCC |
| | | TGCTGCTTTCACTCGTGATCACTCTTTACTGTAAGCGCGGTCG |
| | | GAAGAAGCTGCTGTACATCTTTAAGCAACCCTTCATGAGGCC |
| | | TGTGCAGACTACTCAAGAGGAGGACGGCTGTTCATGCCGGTT |
| | | CCCAGAGGAGGAGGAAGGCGGCTGCGAACTGCGCGTGAAAT |
| | | TCAGCCGCAGCGCAGATGCTCCAGCCTACAAGCAGGGGCAGA |
| | | ACCAGCTCTACAACGAACTCAATCTTGGTCGGAGAGAGGAGT |
| | | ACGACGTGCTGGACAAGCGGAGAGGACGGGACCCAGAAATG |
| | | GGCGGGAAGCCGCGCAGAAAGAATCCCCAAGAGGGCCTGTA |
| | | CAACGAGCTCCAAAAGGATAAGATGGCAGAAGCCTATAGCG |
| | | AGATTGGTATGAAAGGGGAACGCAGAAGAGGCAAAGGCCAC |
| | | GACGGACTGTACCAGGGACTCAGCACCGCCACCAAGGACACC |
| | | TATGACGCTCTTCACATGCAGGCCCTGCCGCCTCGG |

139111

| | | |
|---|---|---|
| 139111- aa | 41 | EVQLLESGGGLVQPGGSLRLSCAVSGFALSNHGMSWVRRAPGK |
| ScFv | | GLEWVSGIVYSGSTYYAASVKGRFTISRDNSRNTLYLQMNSLRP |
| domain | | EDTAIYYCSAHGGESDVWGQGTTVTVSSASGGGGSGGRASGGG |
| | | GSDIVMTQTPLSLSVTPGQPASISCKSSQSLLRNDGKTPLYWYLQ |
| | | KAGQPPQLLIYEVSNRFSGVPDRFSGSGSGTDFTLKISRVEAEDV |
| | | GAYYCMQNIQFPSFGGGTKLEIK |
| 139111- nt | 56 | GAAGTGCAATTGTTGGAATCTGGAGGAGGACTTGTGCAGCCT |
| ScFv | | GGAGGATCACTGAGACTTTCGTGTGCGGTGTCAGGCTTCGCC |
| domain | | CTGAGCAACCACGGCATGAGCTGGGTGCGGAGAGCCCCGGG |
| | | GAAGGGTCTGGAATGGGTGTCCGGGATCGTCTACTCCGGTTC |
| | | AACTTACTACGCCGCAAGCGTGAAGGGTCGCTTCACCATTTCC |
| | | CGCGATAACTCCCGGAACACCCTGTACCTCCAAATGAACTCC |
| | | CTGCGGCCCGAGGACACCGCCATCTACTACTGTTCCGCGCAT |
| | | GGAGGAGAGTCCGATGTCTGGGGACAGGGCACTACCGTGACC |
| | | GTGTCGAGCGCCTCGGGGGGAGGAGGCTCCGGCGGTCGCGCC |
| | | TCCGGGGGGGGTGGCAGCGACATTGTGATGACGCAGACTCCA |
| | | CTCTCGCTGTCCGTGACCCCGGGACAGCCCGCGTCCATCTCGT |
| | | GCAAGAGCTCCCAGAGCCTGCTGAGGAACGACGGAAAGACT |
| | | CCTCTGTATTGGTACCTCCAGAAGGCTGGACAGCCCCCGCAA |
| | | CTGCTCATCTACGAAGTGTCAAATCGCTTCTCCGGGGTGCCGG |
| | | ATCGGTTTTCCGGCTCGGGATCGGGCACCGACTTCACCCTGAA |
| | | AATCTCCAGGGTCGAGGCCGAGGACGTGGGAGCCTACTACTG |
| | | CATGCAAAACATCCAGTTCCCTTCCTTCGGCGGCGGCACAAA |
| | | GCTGGAGATTAAG |
| 139111- aa | 71 | EVQLLESGGGLVQPGGSLRLSCAVSGFALSNHGMSWVRRAPGK |
| VH | | GLEWVSGIVYSGSTYYAASVKGRFTISRDNSRNTLYLQMNSLRP |
| | | EDTAIYYCSAHGGESDVWGQGTTVTVSS |
| 139111- aa | 86 | DIVMTQTPLSLSVTPGQPASISCKSSQSLLRNDGKTPLYWYLQKA |
| VL | | GQPPQLLIYEVSNRFSGVPDRFSGSGSGTDFTLKISRVEAEDVGA |
| | | YYCMQNIQFPSFGGGTKLEIK |
| 139111- aa | 101 | MALPVTALLLPLALLLHAARPEVQLLESGGGLVQPGGSLRLSCA |
| Full CAR | | VSGFALSNHGMSWVRRAPGKGLEWVSGIVYSGSTYYAASVKGR |
| | | FTISRDNSRNTLYLQMNSLRPEDTAIYYCSAHGGESDVWGQGTT |
| | | VTVSSASGGGGSGGRASGGGGSDIVMTQTPLSLSVTPGQPASISC |
| | | KSSQSLLRNDGKTPLYWYLQKAGQPPQLLIYEVSNRFSGVPDRF |
| | | SGSGSGTDFTLKISRVEAEDVGAYYCMQNIQFPSFGGGTKLEIKT |
| | | TTPAPRPPTPAPTIASQPLSLRPEACRPAAGGAVHTRGLDFACDIY |
| | | IWAPLAGTCGVLLLSLVITLYCKRGRKKLLYIFKQPFMRPVQTTQ |
| | | EEDGCSCRFPEEEEGGCELRVKFSRSADAPAYKQGQNQLYNELN |
| | | LGRREEYDVLDKRRGRDPEMGGKPRRKNPQEGLYNELQKDKM |
| | | AEAYSEIGMKGERRRGKGHDGLYQGLSTATKDTYDALHMQAL |
| | | PPR |
| 139111- nt | 116 | ATGGCCCTCCCTGTCACCGCCCTGCTGCTTCCGCTGGCTCTTC |
| Full CAR | | TGCTCCACGCCGCTCGGCCCGAAGTGCAATTGTTGGAATCTG |
| | | GAGGAGGACTTGTGCAGCCTGGAGGATCACTGAGACTTTCGT |
| | | GTGCGGTGTCAGGCTTCGCCCTGAGCAACCACGGCATGAGCT |
| | | GGGTGCGGAGAGCCCCGGGGAAGGGTCTGGAATGGGTGTCC |
| | | GGGATCGTCTACTCCGGTTCAACTTACTACGCCGCAAGCGTG |
| | | AAGGGTCGCTTCACCATTTCCCGCGATAACTCCCGGAACACC |
| | | CTGTACCTCCAAATGAACTCCCTGCGGCCCGAGGACACCGCC |
| | | ATCTACTACTGTTCCGCGCATGGAGGAGAGTCCGATGTCTGG |
| | | GGACAGGGCACTACCGTGACCGTGTCGAGCGCCTCGGGGGGA |
| | | GGAGGCTCCGGCGGTCGCGCCTCCGGGGGGGGTGGCAGCGAC |
| | | ATTGTGATGACGCAGACTCCACTCTCGCTGTCCGTGACCCCGG |
| | | GACAGCCCGCGTCCATCTCGTGCAAGAGCTCCCAGAGCCTGC |
| | | TGAGGAACGACGGAAAGACTCCTCTGTATTGGTACCTCCAGA |
| | | AGGCTGGACAGCCCCCGCAACTGCTCATCTACGAAGTGTCAA |
| | | ATCGCTTCTCCGGGGTGCCGGATCGGTTTTCCGGCTCGGGATC |
| | | GGGCACCGACTTCACCCTGAAAATCTCCAGGGTCGAGGCCGA |
| | | GGACGTGGGAGCCTACTACTGCATGCAAAACATCCAGTTCCC |
| | | TTCCTTCGGCGGCGGCACAAAGCTGGAGATTAAGACCACTAC |
| | | CCCAGCACCGAGGCCACCCACCCCGGCTCCTACCATCGCCTC |
| | | CCAGCCTCTGTCCCTGCGTCCGGAGGCATGTAGACCCGCAGC |
| | | TGGTGGGGCCGTGCATACCCGGGGTCTTGACTTCGCCTGCGAT |
| | | ATCTACATTTGGGCCCCTCTGGCTGGTACTTGCGGGGTCCTGC |
| | | TGCTTTCACTCGTGATCACTCTTTACTGTAAGCGCGGTCGGAA |
| | | GAAGCTGCTGTACATCTTTAAGCAACCCTTCATGAGGCCTGTG |
| | | CAGACTACTCAAGAGGAGGACGGCTGTTCATGCCGGTTCCCA |
| | | GAGGAGGAGGAAGGCGGCTGCGAACTGCGCGTGAAATTCAG |
| | | CCGCAGCGCAGATGCTCCAGCCTACAAGCAGGGGCAGAACCA |
| | | GCTCTACAACGAACTCAATCTTGGTCGGAGAGAGGAGTACGA |
| | | CGTGCTGGACAAGCGGAGAGGACGGGACCCAGAAATGGGCG |
| | | GGAAGCCGCGCAGAAAGAATCCCCAAGAGGGCCTGTACAAC |
| | | GAGCTCCAAAAGGATAAGATGGCAGAAGCCTATAGCGAGATT |
| | | GGTATGAAAGGGGAACGCAGAAGAGGCAAAGGCCACGACGG |
| | | ACTGTACCAGGGACTCAGCACCGCCACCAAGGACACCTATGA |
| | | CGCTCTTCACATGCAGGCCCTGCCGCCTCGG |

139100

| | | |
|---|---|---|
| 139100- aa | 42 | QVQLVQSGAEVRKTGASVKVSCKASGYIFDNFGINWVRQAPGQ |
| ScFv | | GLEWMGWINPKNNNTNYAQKFQGRVTITADESTNTAYMEVSSL |
| domain | | RSEDTAVYYCARGPYYYQSYMDVWGQGTMVTVSSASGGGGSG |
| | | GRASGGGGSDIVMTQTPLSLPVTPGEPASISCRSSQSLLHSNGYN |
| | | YLNWYLQKPGQSPQLLIYLGSKRASGVPDRFSGSGSGTDFTLHIT |
| | | RVGAEDVGVYYCMQALQTPYTFGQGTKLEIK |
| 139100- nt | 57 | CAAGTCCAACTCGTCCAGTCCGGCGCAGAAGTCAGAAAAACC |
| ScFv | | GGTGCTAGCGTGAAAGTGTCCTGCAAGGCCTCCGGCTACATT |
| domain | | TTCGATAACTTCGGAATCAACTGGGTCAGACAGGCCCCGGGC |
| | | CAGGGGCTGGAATGGATGGGATGGATCAACCCCAAGAACAA |
| | | CAACACCAACTACGCACAGAAGTTCCAGGGCCGCGTGACTAT |
| | | CACCGCCGATGAATCGACCAATACCGCCTACATGGAGGTGTC |
| | | CTCCCTGCGGTCGGAGGACACTGCCGTGTATTACTGCGCGAG |
| | | GGGCCCATACTACTACCAAAGCTACATGGACGTCTGGGGACA |
| | | GGGAACCATGGTGACCGTGTCATCCGCCTCCGGTGGTGGAGG |
| | | CTCCGGGGGGCGGGCTTCAGGAGGCGGAGGAAGCGATATTGT |
| | | GATGACCCAGACTCCGCTTAGCCTGCCCGTGACTCCTGGAGA |
| | | ACCGGCCTCCATTTCCTGCCGGTCCTCGCAATCACTCCTGCAT |
| | | TCCAACGGTTACAACTACCTGAATTGGTACCTCCAGAAGCCT |
| | | GGCCAGTCGCCCCAGTTGCTGATCTATCTGGGCTCGAAGCGC |
| | | GCCTCCGGGGTGCCTGACCGGTTTAGCGGATCTGGGAGCGGC |
| | | ACGGACTTCACTCTCCACATCACCCGCGTGGGAGCGGAGGAC |
| | | GTGGGAGTGTACTACTGTATGCAGGCGCTGCAGACTCCGTAC |
| | | ACATTCGGACAGGGCACCAAGCTGGAGATCAAG |
| 139100- aa | 72 | QVQLVQSGAEVRKTGASVKVSCKASGYIFDNFGINWVRQAPGQ |
| VH | | GLEWMGWINPKNNNTNYAQKFQGRVTITADESTNTAYMEVSSL |
| | | RSEDTAVYYCARGPYYYQSYMDVWGQGTMVTVSS |
| 139100- aa | 87 | DIVMTQTPLSLPVTPGEPASISCRSSQSLLHSNGYNYLNWYLQKP |
| VL | | GQSPQLLIYLGSKRASGVPDRFSGSGSGTDFTLHITRVGAEDVGV |
| | | YYCMQALQTPYTFGQGTKLEIK |
| 139100- aa | 102 | MALPVTALLLPLALLLHAARPQVQLVQSGAEVRKTGASVKVSC |
| Full CAR | | KASGYIFDNFGINWVRQAPGQGLEWMGWINPKNNNTNYAQKF |
| | | QGRVTITADESTNTAYMEVSSLRSEDTAVYYCARGPYYYQSYM |
| | | DVWGQGTMVTVSSASGGGGSGGRASGGGGSDIVMTQTPLSLPV |
| | | TPGEPASISCRSSQSLLHSNGYNYLNWYLQKPGQSPQLLIYLGSK |
| | | RASGVPDRFSGSGSGTDFTLHITRVGAEDVGVYYCMQALQTPYT |
| | | FGQGTKLEIKTTTPAPRPPTPAPTIASQPLSLRPEACRPAAGGAVH |
| | | TRGLDFACDIYIWAPLAGTCGVLLLSLVITLYCKRGRKKLLYIFK |
| | | QPFMRPVQTTQEEDGCSCRFPEEEEGGCELRVKFSRSADAPAYK |
| | | QGQNQLYNELNLGRREEYDVLDKRRGRDPEMGGKPRRKNPQE |
| | | GLYNELQKDKMAEAYSEIGMKGERRRGKGHDGLYQGLSTATK |
| | | DTYDALHMQALPPR |
| 139100- nt | 117 | ATGGCCCTCCCTGTCACCGCCCTGCTGCTTCCGCTGGCTCTTC |
| Full CAR | | TGCTCCACGCCGCTCGGCCCCAAGTCCAACTCGTCCAGTCCGG |
| | | CGCAGAAGTCAGAAAAACCGGTGCTAGCGTGAAAGTGTCCTG |
| | | CAAGGCCTCCGGCTACATTTTCGATAACTTCGGAATCAACTGG |
| | | GTCAGACAGGCCCCGGGCCAGGGGCTGGAATGGATGGGATG |
| | | GATCAACCCCAAGAACAACAACACCAACTACGCACAGAAGTT |
| | | CCAGGGCCGCGTGACTATCACCGCCGATGAATCGACCAATAC |
| | | CGCCTACATGGAGGTGTCCTCCCTGCGGTCGGAGGACACTGC |
| | | CGTGTATTACTGCGCGAGGGGCCCATACTACTACCAAAGCTA |
| | | CATGGACGTCTGGGGACAGGGAACCATGGTGACCGTGTCATC |
| | | CGCCTCCGGTGGTGGAGGCTCCGGGGGGCGGGCTTCAGGAGG |
| | | CGGAGGAAGCGATATTGTGATGACCCAGACTCCGCTTAGCCT |
| | | GCCCGTGACTCCTGGAGAACCGGCCTCCATTTCCTGCCGGTCC |
| | | TCGCAATCACTCCTGCATTCCAACGGTTACAACTACCTGAATT |
| | | GGTACCTCCAGAAGCCTGGCCAGTCGCCCCAGTTGCTGATCT |
| | | ATCTGGGCTCGAAGCGCGCCTCCGGGGTGCCTGACCGGTTTA |
| | | GCGGATCTGGGAGCGGCACGGACTTCACTCTCCACATCACCC |
| | | GCGTGGGAGCGGAGGACGTGGGAGTGTACTACTGTATGCAGG |
| | | CGCTGCAGACTCCGTACACATTCGGACAGGGCACCAAGCTGG |
| | | AGATCAAGACCACTACCCCAGCACCGAGGCCACCCACCCCGG |
| | | CTCCTACCATCGCCTCCCAGCCTCTGTCCCTGCGTCCGGAGGC |
| | | ATGTAGACCCGCAGCTGGTGGGGCCGTGCATACCCGGGGTCT |
| | | TGACTTCGCCTGCGATATCTACATTTGGGCCCCTCTGGCTGGT |
| | | ACTTGCGGGGTCCTGCTGCTTTCACTCGTGATCACTCTTTACT |
| | | GTAAGCGCGGTCGGAAGAAGCTGCTGTACATCTTTAAGCAAC |
| | | CCTTCATGAGGCCTGTGCAGACTACTCAAGAGGAGGACGGCT |
| | | GTTCATGCCGGTTCCCAGAGGAGGAGGAAGGCGGCTGCGAAC |
| | | TGCGCGTGAAATTCAGCCGCAGCGCAGATGCTCCAGCCTACA |
| | | AGCAGGGGCAGAACCAGCTCTACAACGAACTCAATCTTGGTC |
| | | GGAGAGAGGAGTACGACGTGCTGGACAAGCGGAGAGGACGG |
| | | GACCCAGAAATGGGCGGGAAGCCGCGCAGAAAGAATCCCCA |
| | | AGAGGGCCTGTACAACGAGCTCCAAAAGGATAAGATGGCAG |
| | | AAGCCTATAGCGAGATTGGTATGAAAGGGGAACGCAGAAGA |
| | | GGCAAAGGCCACGACGGACTGTACCAGGGACTCAGCACCGCC |
| | | ACCAAGGACACCTATGACGCTCTTCACATGCAGGCCCTGCCG |
| | | CCTCGG |

139101

| | | |
|---|---|---|
| 139101- aa | 43 | QVQLQESGGGLVQPGGSLRLSCAASGFTFSSDAMTWVRQAPGK |
| ScFv | | GLEWVSVISGSGGTTYYADSVKGRFTISRDNSKNTLYLQMNSLR |
| domain | | AEDTAVYYCAKLDSSGYYYARGPRYWGQGTLVTVSSASGGGG |
| | | SGGRASGGGGSDIQLTQSPSSLSASVGDRVTITCRASQSISSYLN |
| | | WYQQKPGKAPKLLIYGASTLASGVPARFSGSGSGTHFTLTINSLQ |
| | | SEDSATYYCQQSYKRASFGQGTKVEIK |
| 139101- nt | 58 | CAAGTGCAACTTCAAGAATCAGGCGGAGGACTCGTGCAGCCC |
| ScFv | | GGAGGATCATTGCGGCTCTCGTGCGCCGCCTCGGGCTTCACCT |
| domain | | TCTCGAGCGACGCCATGACCTGGGTCCGCCAGGCCCCGGGGA |
| | | AGGGGCTGGAATGGGTGTCTGTGATTTCCGGCTCCGGGGGAA |
| | | CTACGTACTACGCCGATTCCGTGAAAGGTCGCTTCACTATCTC |
| | | CCGGGACAACAGCAAGAACACCCTTTATCTGCAAATGAATTC |
| | | CCTCCGCGCCGAGGACACCGCCGTGTACTACTGCGCCAAGCT |
| | | GGACTCCTCGGGCTACTACTATGCCCGGGGTCCGAGATACTG |
| | | GGGACAGGGAACCCTCGTGACCGTGTCCTCCGCGTCCGGCGG |
| | | AGGAGGGTCGGGAGGGCGGGCCTCCGGCGGCGGCGGTTCGG |
| | | ACATCCAGCTGACCCAGTCCCCATCCTCACTGAGCGCAAGCG |
| | | TGGGCGACAGAGTCACCATTACATGCAGGGCGTCCCAGAGCA |
| | | TCAGCTCCTACCTGAACTGGTACCAACAGAAGCCTGGAAAGG |
| | | CTCCTAAGCTGTTGATCTACGGGGCTTCGACCCTGGCATCCGG |
| | | GGTGCCCGCGAGGTTTAGCGGAAGCGGTAGCGGCACTCACTT |
| | | CACTCTGACCATTAACAGCCTCCAGTCCGAGGATTCAGCCACT |
| | | TACTACTGTCAGCAGTCCTACAAGCGGGCCAGCTTCGGACAG |
| | | GGCACTAAGGTCGAGATCAAG |
| 139101- aa | 73 | QVQLQESGGGLVQPGGSLRLSCAASGFTFSSDAMTWVRQAPGK |
| VH | | GLEWVSVISGSGGTTYYADSVKGRFTISRDNSKNTLYLQMNSLR |
| | | AEDTAVYYCAKLDSSGYYYARGPRYWGQGTLVTVSS |
| 139101- aa | 88 | DIQLTQSPSSLSASVGDRVTITCRASQSISSYLNWYQQKPGKAPK |
| VL | | LLIYGASTLASGVPARFSGSGSGTHFTLTINSLQSEDSATYYCQQS |
| | | YKRASFGQGTKVEIK |
| 139101- aa | 103 | MALPVTALLLPLALLLHAARPQVQLQESGGGLVQPGGSLRLSCA |
| Full CAR | | ASGFTFSSDAMTWVRQAPGKGLEWVSVISGSGGTTYYADSVKG |
| | | RFTISRDNSKNTLYLQMNSLRAEDTAVYYCAKLDSSGYYYARG |
| | | PRYWGQGTLVTVSSASGGGGSGGRASGGGGSDIQLTQSPSSLSA |
| | | SVGDRVTITCRASQSISSYLNWYQQKPGKAPKLLIYGASTLASGV |
| | | PARFSGSGSGTHFTLTINSLQSEDSATYYCQQSYKRASFGQGTKV |
| | | EIKTTTPAPRPPTPAPTIASQPLSLRPEACRPAAGGAVHTRGLDFA |
| | | CDIYIWAPLAGTCGVLLLSLVITLYCKRGRKKLLYIFKQPFMRPV |
| | | QTTQEEDGCSCRFPEEEEGGCELRVKFSRSADAPAYKQGQNQLY |
| | | NELNLGRREEYDVLDKRRGRDPEMGGKPRRKNPQEGLYNELQK |
| | | DKMAEAYSEIGMKGERRRGKGHDGLYQGLSTATKDTYDALHM |
| | | QALPPR |
| 139101- nt | 118 | ATGGCCCTCCCTGTCACCGCCCTGCTGCTTCCGCTGGCTCTTC |
| Full CAR | | TGCTCCACGCCGCTCGGCCCCAAGTGCAACTTCAAGAATCAG |
| | | GCGGAGGACTCGTGCAGCCCGGAGGATCATTGCGGCTCTCGT |
| | | GCGCCGCCTCGGGCTTCACCTTCTCGAGCGACGCCATGACCTG |
| | | GGTCCGCCAGGCCCCGGGGAAGGGGCTGGAATGGGTGTCTGT |
| | | GATTTCCGGCTCCGGGGGAACTACGTACTACGCCGATTCCGT |
| | | GAAAGGTCGCTTCACTATCTCCCGGGACAACAGCAAGAACAC |
| | | CCTTTATCTGCAAATGAATTCCCTCCGCGCCGAGGACACCGCC |
| | | GTGTACTACTGCGCCAAGCTGGACTCCTCGGGCTACTACTATG |
| | | CCCGGGGTCCGAGATACTGGGGACAGGGAACCCTCGTGACCG |
| | | TGTCCTCCGCGTCCGGCGGAGGAGGGTCGGGAGGGCGGGCCT |
| | | CCGGCGGCGGCGGTTCGGACATCCAGCTGACCCAGTCCCCAT |
| | | CCTCACTGAGCGCAAGCGTGGGCGACAGAGTCACCATTACAT |
| | | GCAGGGCGTCCCAGAGCATCAGCTCCTACCTGAACTGGTACC |
| | | AACAGAAGCCTGGAAAGGCTCCTAAGCTGTTGATCTACGGGG |
| | | CTTCGACCCTGGCATCCGGGGTGCCCGCGAGGTTTAGCGGAA |
| | | GCGGTAGCGGCACTCACTTCACTCTGACCATTAACAGCCTCCA |
| | | GTCCGAGGATTCAGCCACTTACTACTGTCAGCAGTCCTACAA |
| | | GCGGGCCAGCTTCGGACAGGGCACTAAGGTCGAGATCAAGAC |
| | | CACTACCCCAGCACCGAGGCCACCCACCCCGGCTCCTACCAT |
| | | CGCCTCCCAGCCTCTGTCCCTGCGTCCGGAGGCATGTAGACCC |
| | | GCAGCTGGTGGGGCCGTGCATACCCGGGGTCTTGACTTCGCC |
| | | TGCGATATCTACATTTGGGCCCCTCTGGCTGGTACTTGCGGGG |
| | | TCCTGCTGCTTTCACTCGTGATCACTCTTTACTGTAAGCGCGG |
| | | TCGGAAGAAGCTGCTGTACATCTTTAAGCAACCCTTCATGAG |
| | | GCCTGTGCAGACTACTCAAGAGGAGGACGGCTGTTCATGCCG |
| | | GTTCCCAGAGGAGGAGGAAGGCGGCTGCGAACTGCGCGTGA |
| | | AATTCAGCCGCAGCGCAGATGCTCCAGCCTACAAGCAGGGGC |
| | | AGAACCAGCTCTACAACGAACTCAATCTTGGTCGGAGAGAGG |
| | | AGTACGACGTGCTGGACAAGCGGAGAGGACGGGACCCAGAA |
| | | ATGGGCGGGAAGCCGCGCAGAAAGAATCCCCAAGAGGGCCT |
| | | GTACAACGAGCTCCAAAAGGATAAGATGGCAGAAGCCTATA |
| | | GCGAGATTGGTATGAAAGGGGAACGCAGAAGAGGCAAAGGC |
| | | CACGACGGACTGTACCAGGGACTCAGCACCGCCACCAAGGAC |
| | | ACCTATGACGCTCTTCACATGCAGGCCCTGCCGCCTCGG |

139102

| | | |
|---|---|---|
| 139102- aa | 44 | QVQLVQSGAEVKKPGASVKVSCKASGYTFSNYGITWVRQAPGQ |
| ScFv | | GLEWMGWISAYNGNTNYAQKFQGRVTMTRNTSISTAYMELSSL |
| domain | | RSEDTAVYYCARGPYYYYMDVWGKGTMVTVSSASGGGGSGG |
| | | RASGGGGSEIVMTQSPLSLPVTPGEPASISCRSSQSLLYSNGYNY |
| | | VDWYLQKPGQSPQLLIYLGSNRASGVPDRFSGSGSGTDFKLQISR |
| | | VEAEDVGIYYCMQGRQFPYSFGQGTKVEIK |
| 139102- nt | 59 | CAAGTCCAACTGGTCCAGAGCGGTGCAGAAGTGAAGAAGCCC |
| ScFv | | GGAGCGAGCGTGAAAGTGTCCTGCAAGGCTTCCGGGTACACC |
| domain | | TTCTCCAACTACGGCATCACTTGGGTGCGCCAGGCCCCGGGA |
| | | CAGGGCCTGGAATGGATGGGGTGGATTTCCGCGTACAACGGC |
| | | AATACGAACTACGCTCAGAAGTTCCAGGGTAGAGTGACCATG |
| | | ACTAGGAACACCTCCATTTCCACCGCCTACATGGAACTGTCCT |
| | | CCCTGCGGAGCGAGGACACCGCCGTGTACTATTGCGCCCGGG |
| | | GACCATACTACTACTACATGGATGTCTGGGGGAAGGGGACTA |
| | | TGGTCACCGTGTCATCCGCCTCGGGAGGCGGCGGATCAGGAG |
| | | GACGCGCCTCTGGTGGTGGAGGATCGGAGATCGTGATGACCC |
| | | AGAGCCCTCTCTCCTTGCCCGTGACTCCTGGGGAGCCCGCATC |
| | | CATTTCATGCCGGAGCTCCCAGTCACTTCTCTACTCCAACGGC |
| | | TATAACTACGTGGATTGGTACCTCCAAAAGCCGGGCCAGAGC |
| | | CCGCAGCTGCTGATCTACCTGGGCTCGAACAGGGCCAGCGGA |
| | | GTGCCTGACCGGTTCTCCGGGTCGGGAAGCGGGACCGACTTC |
| | | AAGCTGCAAATCTCGAGAGTGGAGGCCGAGGACGTGGGAAT |
| | | CTACTACTGTATGCAGGGCCGCCAGTTTCCGTACTCGTTCGGA |
| | | CAGGGCACCAAAGTGGAAATCAAG |
| 139102- aa | 74 | QVQLVQSGAEVKKPGASVKVSCKASGYTFSNYGITWVRQAPGQ |
| VH | | GLEWMGWISAYNGNTNYAQKFQGRVTMTRNTSISTAYMELSSL |
| | | RSEDTAVYYCARGPYYYYMDVWGKGTMVTVSS |
| 139102- aa | 89 | EIVMTQSPLSLPVTPGEPASISCRSSQSLLYSNGYNYVDWYLQKP |
| VL | | GQSPQLLIYLGSNRASGVPDRFSGSGSGTDFKLQISRVEAEDVGI |
| | | YYCMQGRQFPYSFGQGTKVEIK |
| 139102- aa | 104 | MALPVTALLLPLALLLHAARPQVQLVQSGAEVKKPGASVKVSC |
| Full CAR | | KASGYTFSNYGITWVRQAPGQGLEWMGWISAYNGNTNYAQKF |
| | | QGRVTMTRNTSISTAYMELSSLRSEDTAVYYCARGPYYYYMDV |
| | | WGKGTMVTVSSASGGGGSGGRASGGGGSEIVMTQSPLSLPVTP |
| | | GEPASISCRSSQSLLYSNGYNYVDWYLQKPGQSPQLLIYLGSNRA |
| | | SGVPDRFSGSGSGTDFKLQISRVEAEDVGIYYCMQGRQFPYSFG |
| | | QGTKVEIKTTTPAPRPPTPAPTIASQPLSLRPEACRPAAGGAVHTR |
| | | GLDFACDIYIWAPLAGTCGVLLLSLVITLYCKRGRKKLLYIFKQP |
| | | FMRPVQTTQEEDGCSCRFPEEEEGGCELRVKFSRSADAPAYKQG |
| | | QNQLYNELNLGRREEYDVLDKRRGRDPEMGGKPRRKNPQEGL |
| | | YNELQKDKMAEAYSEIGMKGERRRGKGHDGLYQGLSTATKDT |
| | | YDALHMQALPPR |
| 139102- nt | 119 | ATGGCCCTCCCTGTCACCGCCCTGCTGCTTCCGCTGGCTCTTC |
| Full CAR | | TGCTCCACGCCGCTCGGCCCCAAGTCCAACTGGTCCAGAGCG |
| | | GTGCAGAAGTGAAGAAGCCCGGAGCGAGCGTGAAAGTGTCC |
| | | TGCAAGGCTTCCGGGTACACCTTCTCCAACTACGGCATCACTT |
| | | GGGTGCGCCAGGCCCCGGGACAGGGCCTGGAATGGATGGGG |
| | | TGGATTTCCGCGTACAACGGCAATACGAACTACGCTCAGAAG |
| | | TTCCAGGGTAGAGTGACCATGACTAGGAACACCTCCATTTCC |
| | | ACCGCCTACATGGAACTGTCCTCCCTGCGGAGCGAGGACACC |
| | | GCCGTGTACTATTGCGCCCGGGGACCATACTACTACTACATG |
| | | GATGTCTGGGGGAAGGGGACTATGGTCACCGTGTCATCCGCC |
| | | TCGGGAGGCGGCGGATCAGGAGGACGCGCCTCTGGTGGTGGA |
| | | GGATCGGAGATCGTGATGACCCAGAGCCCTCTCTCCTTGCCC |
| | | GTGACTCCTGGGGAGCCCGCATCCATTTCATGCCGGAGCTCCC |
| | | AGTCACTTCTCTACTCCAACGGCTATAACTACGTGGATTGGTA |
| | | CCTCCAAAAGCCGGGCCAGAGCCCGCAGCTGCTGATCTACCT |
| | | GGGCTCGAACAGGGCCAGCGGAGTGCCTGACCGGTTCTCCGG |
| | | GTCGGGAAGCGGGACCGACTTCAAGCTGCAAATCTCGAGAGT |
| | | GGAGGCCGAGGACGTGGGAATCTACTACTGTATGCAGGGCCG |
| | | CCAGTTTCCGTACTCGTTCGGACAGGGCACCAAAGTGGAAAT |
| | | CAAGACCACTACCCCAGCACCGAGGCCACCCACCCCGGCTCC |
| | | TACCATCGCCTCCCAGCCTCTGTCCCTGCGTCCGGAGGCATGT |
| | | AGACCCGCAGCTGGTGGGGCCGTGCATACCCGGGGTCTTGAC |
| | | TTCGCCTGCGATATCTACATTTGGGCCCCTCTGGCTGGTACTT |
| | | GCGGGGTCCTGCTGCTTTCACTCGTGATCACTCTTTACTGTAA |
| | | GCGCGGTCGGAAGAAGCTGCTGTACATCTTTAAGCAACCCTT |
| | | CATGAGGCCTGTGCAGACTACTCAAGAGGAGGACGGCTGTTC |
| | | ATGCCGGTTCCCAGAGGAGGAGGAAGGCGGCTGCGAACTGC |
| | | GCGTGAAATTCAGCCGCAGCGCAGATGCTCCAGCCTACAAGC |
| | | AGGGGCAGAACCAGCTCTACAACGAACTCAATCTTGGTCGGA |
| | | GAGAGGAGTACGACGTGCTGGACAAGCGGAGAGGACGGGAC |
| | | CCAGAAATGGGCGGGAAGCCGCGCAGAAAGAATCCCCAAGA |
| | | GGGCCTGTACAACGAGCTCCAAAAGGATAAGATGGCAGAAG |
| | | CCTATAGCGAGATTGGTATGAAAGGGGAACGCAGAAGAGGC |
| | | AAAGGCCACGACGGACTGTACCAGGGACTCAGCACCGCCACC |
| | | AAGGACACCTATGACGCTCTTCACATGCAGGCCCTGCCGCCT |
| | | CGG |

139104

| | | |
|---|---|---|
| 139104- aa | 45 | EVQLLETGGGLVQPGGSLRLSCAVSGFALSNHGMSWVRRAPGK |
| ScFv | | GLEWVSGIVYSGSTYYAASVKGRFTISRDNSRNTLYLQMNSLRP |
| domain | | EDTAIYYCSAHGGESDVWGQGTTVTVSSASGGGGSGGRASGGG |
| | | GSEIVLTQSPATLSVSPGESATLSCRASQSVSSNLAWYQQKPGQA |
| | | PRLLIYGASTRASGIPDRFSGSGSGTDFTLTISSLQAEDVAVYYCQ |
| | | QYGSSLTFGGGTKVEIK |
| 139104- nt | 60 | GAAGTGCAATTGCTCGAAACTGGAGGAGGTCTGGTGCAACCT |
| ScFv | | GGAGGATCACTTCGCCTGTCCTGCGCCGTGTCGGGCTTTGCCC |
| domain | | TGTCCAACCATGGAATGAGCTGGGTCCGCCGCGCGCCGGGGA |
| | | AGGGCCTCGAATGGGTGTCCGGCATCGTCTACTCCGGCTCCA |
| | | CCTACTACGCCGCGTCCGTGAAGGGCCGGTTCACGATTTCAC |
| | | GGGACAACTCGCGGAACACCCTGTACCTCCAAATGAATTCCC |
| | | TTCGGCCGGAGGATACTGCCATCTACTACTGCTCCGCCCACGG |
| | | TGGCGAATCCGACGTCTGGGGCCAGGGAACCACCGTGACCGT |
| | | GTCCAGCGCGTCCGGGGGAGGAGGAAGCGGGGGTAGAGCAT |
| | | CGGGTGGAGGCGGATCAGAGATCGTGCTGACCCAGTCCCCCG |
| | | CCACCTTGAGCGTGTCACCAGGAGAGTCCGCCACCCTGTCAT |
| | | GCCGCGCCAGCCAGTCCGTGTCCTCCAACCTGGCTTGGTACCA |
| | | GCAGAAGCCGGGGCAGGCCCCTAGACTCCTGATCTATGGGGC |
| | | GTCGACCCGGGCATCTGGAATTCCCGATAGGTTCAGCGGATC |
| | | GGGCTCGGGCACTGACTTCACTCTGACCATCTCCTCGCTGCAA |
| | | GCCGAGGACGTGGCTGTGTACTACTGTCAGCAGTACGGAAGC |
| | | TCCCTGACTTTCGGTGGCGGGACCAAAGTCGAGATTAAG |
| 139104- aa | 75 | EVQLLETGGGLVQPGGSLRLSCAVSGFALSNHGMSWVRRAPGK |
| VH | | GLEWVSGIVYSGSTYYAASVKGRFTISRDNSRNTLYLQMNSLRP |
| | | EDTAIYYCSAHGGESDVWGQGTTVTVSS |
| 139104- aa | 90 | EIVLTQSPATLSVSPGESATLSCRASQSVSSNLAWYQQKPGQAPR |
| VL | | LLIYGASTRASGIPDRFSGSGSGTDFTLTISSLQAEDVAVYYCQQ |
| | | YGSSLTFGGGTKVEIK |
| 139104- aa | 105 | MALPVTALLLPLALLLHAARPEVQLLETGGGLVQPGGSLRLSCA |
| Full CAR | | VSGFALSNHGMSWVRRAPGKGLEWVSGIVYSGSTYYAASVKGR |
| | | FTISRDNSRNTLYLQMNSLRPEDTAIYYCSAHGGESDVWGQGTT |
| | | VTVSSASGGGGSGGRASGGGGSEIVLTQSPATLSVSPGESATLSC |
| | | RASQSVSSNLAWYQQKPGQAPRLLIYGASTRASGIPDRFSGSGSG |
| | | TDFTLTISSLQAEDVAVYYCQQYGSSLTFGGGTKVEIKTTTPAPR |
| | | PPTPAPTIASQPLSLRPEACRPAAGGAVHTRGLDFACDIYIWAPL |
| | | AGTCGVLLLSLVITLYCKRGRKKLLYIFKQPFMRPVQTTQEEDG |
| | | CSCRFPEEEEGGCELRVKFSRSADAPAYKQGQNQLYNELNLGRR |
| | | EEYDVLDKRRGRDPEMGGKPRRKNPQEGLYNELQKDKMAEAY |
| | | SEIGMKGERRRGKGHDGLYQGLSTATKDTYDALHMQALPPR |
| 139104- nt | 120 | ATGGCCCTCCCTGTCACCGCCCTGCTGCTTCCGCTGGCTCTTC |
| Full CAR | | TGCTCCACGCCGCTCGGCCCGAAGTGCAATTGCTCGAAACTG |
| | | GAGGAGGTCTGGTGCAACCTGGAGGATCACTTCGCCTGTCCT |
| | | GCGCCGTGTCGGGCTTTGCCCTGTCCAACCATGGAATGAGCT |
| | | GGGTCCGCCGCGCGCCGGGGAAGGGCCTCGAATGGGTGTCCG |
| | | GCATCGTCTACTCCGGCTCCACCTACTACGCCGCGTCCGTGAA |
| | | GGGCCGGTTCACGATTTCACGGGACAACTCGCGGAACACCCT |
| | | GTACCTCCAAATGAATTCCCTTCGGCCGGAGGATACTGCCATC |
| | | TACTACTGCTCCGCCCACGGTGGCGAATCCGACGTCTGGGGC |
| | | CAGGGAACCACCGTGACCGTGTCCAGCGCGTCCGGGGGAGGA |
| | | GGAAGCGGGGGTAGAGCATCGGGTGGAGGCGGATCAGAGAT |
| | | CGTGCTGACCCAGTCCCCCGCCACCTTGAGCGTGTCACCAGG |
| | | AGAGTCCGCCACCCTGTCATGCCGCGCCAGCCAGTCCGTGTC |
| | | CTCCAACCTGGCTTGGTACCAGCAGAAGCCGGGGCAGGCCCC |
| | | TAGACTCCTGATCTATGGGGCGTCGACCCGGGCATCTGGAAT |
| | | TCCCGATAGGTTCAGCGGATCGGGCTCGGGCACTGACTTCAC |
| | | TCTGACCATCTCCTCGCTGCAAGCCGAGGACGTGGCTGTGTAC |
| | | TACTGTCAGCAGTACGGAAGCTCCCTGACTTTCGGTGGCGGG |
| | | ACCAAAGTCGAGATTAAGACCACTACCCCAGCACCGAGGCCA |
| | | CCCACCCCGGCTCCTACCATCGCCTCCCAGCCTCTGTCCCTGC |
| | | GTCCGGAGGCATGTAGACCCGCAGCTGGTGGGGCCGTGCATA |
| | | CCCGGGGTCTTGACTTCGCCTGCGATATCTACATTTGGGCCCC |
| | | TCTGGCTGGTACTTGCGGGGTCCTGCTGCTTTCACTCGTGATC |
| | | ACTCTTTACTGTAAGCGCGGTCGGAAGAAGCTGCTGTACATCT |
| | | TTAAGCAACCCTTCATGAGGCCTGTGCAGACTACTCAAGAGG |
| | | AGGACGGCTGTTCATGCCGGTTCCCAGAGGAGGAGGAAGGCG |
| | | GCTGCGAACTGCGCGTGAAATTCAGCCGCAGCGCAGATGCTC |
| | | CAGCCTACAAGCAGGGGCAGAACCAGCTCTACAACGAACTCA |
| | | ATCTTGGTCGGAGAGAGGAGTACGACGTGCTGGACAAGCGGA |
| | | GAGGACGGGACCCAGAAATGGGCGGGAAGCCGCGCAGAAAG |
| | | AATCCCCAAGAGGGCCTGTACAACGAGCTCCAAAAGGATAAG |
| | | ATGGCAGAAGCCTATAGCGAGATTGGTATGAAAGGGGAACG |
| | | CAGAAGAGGCAAAGGCCACGACGGACTGTACCAGGGACTCA |
| | | GCACCGCCACCAAGGACACCTATGACGCTCTTCACATGCAGG |
| | | CCCTGCCGCCTCGG |

139106

| | | |
|---|---|---|
| 139106- aa | 46 | EVQLVETGGGLVQPGGSLRLSCAVSGFALSNHGMSWVRRAPGK |
| ScFv | | GLEWVSGIVYSGSTYYAASVKGRFTISRDNSRNTLYLQMNSLRP |
| domain | | EDTAIYYCSAHGGESDVWGQGTTVTVSSASGGGGSGGRASGGG |
| | | GSEIVMTQSPATLSVSPGERATLSCRASQSVSSKLAWYQQKPGQ |
| | | APRLLMYGASIRATGIPDRFSGSGSGTEFTLTISSLEPEDFAVYYC |
| | | QQYGSSSWTFGQGTKVEIK |
| 139106- nt | 61 | GAAGTGCAATTGGTGGAAACTGGAGGAGGACTTGTGCAACCT |
| ScFv | | GGAGGATCATTGAGACTGAGCTGCGCAGTGTCGGGATTCGCC |
| domain | | CTGAGCAACCATGGAATGTCCTGGGTCAGAAGGGCCCCTGGA |
| | | AAAGGCCTCGAATGGGTGTCAGGGATCGTGTACTCCGGTTCC |
| | | ACTTACTACGCCGCCTCCGTGAAGGGGCGCTTCACTATCTCAC |
| | | GGGATAACTCCCGCAATACCCTGTACCTCCAAATGAACAGCC |
| | | TGCGGCCGGAGGATACCGCCATCTACTACTGTTCCGCCCACG |
| | | GTGGAGAGTCTGACGTCTGGGGCCAGGGAACTACCGTGACCG |
| | | TGTCCTCCGCGTCCGGCGGTGGAGGGAGCGGCGGCCGCGCCA |
| | | GCGGCGGCGGAGGCTCCGAGATCGTGATGACCCAGAGCCCCG |
| | | CTACTCTGTCGGTGTCGCCCGGAGAAAGGGCGACCCTGTCCT |
| | | GCCGGGCGTCGCAGTCCGTGAGCAGCAAGCTGGCTTGGTACC |
| | | AGCAGAAGCCGGGCCAGGCACCACGCCTGCTTATGTACGGTG |
| | | CCTCCATTCGGGCCACCGGAATCCCGGACCGGTTCTCGGGGT |
| | | CGGGGTCCGGTACCGAGTTCACACTGACCATTTCCTCGCTCGA |
| | | GCCCGAGGACTTTGCCGTCTATTACTGCCAGCAGTACGGCTCC |
| | | TCCTCATGGACGTTCGGCCAGGGGACCAAGGTCGAAATCAAG |
| 139106- aa | 76 | EVQLVETGGGLVQPGGSLRLSCAVSGFALSNHGMSWVRRAPGK |
| VH | | GLEWVSGIVYSGSTYYAASVKGRFTISRDNSRNTLYLQMNSLRP |
| | | EDTAIYYCSAHGGESDVWGQGTTVTVSS |
| 139106- aa | 91 | EIVMTQSPATLSVSPGERATLSCRASQSVSSKLAWYQQKPGQAP |
| VL | | RLLMYGASIRATGIPDRFSGSGSGTEFTLTISSLEPEDFAVYYCQQ |
| | | YGSSSWTFGQGTKVEIK |
| 139106- aa | 106 | MALPVTALLLPLALLLHAARPEVQLVETGGGLVQPGGSLRLSCA |
| Full CAR | | VSGFALSNHGMSWVRRAPGKGLEWVSGIVYSGSTYYAASVKGR |
| | | FTISRDNSRNTLYLQMNSLRPEDTAIYYCSAHGGESDVWGQGTT |
| | | VTVSSASGGGGSGGRASGGGGSEIVMTQSPATLSVSPGERATLS |
| | | CRASQSVSSKLAWYQQKPGQAPRLLMYGASIRATGIPDRFSGSG |
| | | SGTEFTLTISSLEPEDFAVYYCQQYGSSSWTFGQGTKVEIKTTTP |
| | | APRPPTPAPTIASQPLSLRPEACRPAAGGAVHTRGLDFACDIYIW |
| | | APLAGTCGVLLLSLVITLYCKRGRKKLLYIFKQPFMRPVQTTQEE |
| | | DGCSCRFPEEEEGGCELRVKFSRSADAPAYKQGQNQLYNELNLG |
| | | RREEYDVLDKRRGRDPEMGGKPRRKNPQEGLYNELQKDKMAE |
| | | AYSEIGMKGERRRGKGHDGLYQGLSTATKDTYDALHMQALPPR |
| 139106- nt | 121 | ATGGCCCTCCCTGTCACCGCCCTGCTGCTTCCGCTGGCTCTTC |
| Full CAR | | TGCTCCACGCCGCTCGGCCCGAAGTGCAATTGGTGGAAACTG |
| | | GAGGAGGACTTGTGCAACCTGGAGGATCATTGAGACTGAGCT |
| | | GCGCAGTGTCGGGATTCGCCCTGAGCAACCATGGAATGTCCT |
| | | GGGTCAGAAGGGCCCCTGGAAAAGGCCTCGAATGGGTGTCAG |
| | | GGATCGTGTACTCCGGTTCCACTTACTACGCCGCCTCCGTGAA |
| | | GGGGCGCTTCACTATCTCACGGGATAACTCCCGCAATACCCT |
| | | GTACCTCCAAATGAACAGCCTGCGGCCGGAGGATACCGCCAT |
| | | CTACTACTGTTCCGCCCACGGTGGAGAGTCTGACGTCTGGGG |
| | | CCAGGGAACTACCGTGACCGTGTCCTCCGCGTCCGGCGGTGG |
| | | AGGGAGCGGCGGCCGCGCCAGCGGCGGCGGAGGCTCCGAGA |
| | | TCGTGATGACCCAGAGCCCCGCTACTCTGTCGGTGTCGCCCGG |
| | | AGAAAGGGCGACCCTGTCCTGCCGGGCGTCGCAGTCCGTGAG |
| | | CAGCAAGCTGGCTTGGTACCAGCAGAAGCCGGGCCAGGCACC |
| | | ACGCCTGCTTATGTACGGTGCCTCCATTCGGGCCACCGGAATC |
| | | CCGGACCGGTTCTCGGGGTCGGGGTCCGGTACCGAGTTCACA |
| | | CTGACCATTTCCTCGCTCGAGCCCGAGGACTTTGCCGTCTATT |
| | | ACTGCCAGCAGTACGGCTCCTCCTCATGGACGTTCGGCCAGG |
| | | GGACCAAGGTCGAAATCAAGACCACTACCCCAGCACCGAGGC |
| | | CACCCACCCCGGCTCCTACCATCGCCTCCCAGCCTCTGTCCCT |
| | | GCGTCCGGAGGCATGTAGACCCGCAGCTGGTGGGGCCGTGCA |
| | | TACCCGGGGTCTTGACTTCGCCTGCGATATCTACATTTGGGCC |
| | | CCTCTGGCTGGTACTTGCGGGGTCCTGCTGCTTTCACTCGTGA |
| | | TCACTCTTTACTGTAAGCGCGGTCGGAAGAAGCTGCTGTACAT |
| | | CTTTAAGCAACCCTTCATGAGGCCTGTGCAGACTACTCAAGA |
| | | GGAGGACGGCTGTTCATGCCGGTTCCCAGAGGAGGAGGAAG |
| | | GCGGCTGCGAACTGCGCGTGAAATTCAGCCGCAGCGCAGATG |
| | | CTCCAGCCTACAAGCAGGGGCAGAACCAGCTCTACAACGAAC |
| | | TCAATCTTGGTCGGAGAGAGGAGTACGACGTGCTGGACAAGC |
| | | GGAGAGGACGGGACCCAGAAATGGGCGGGAAGCCGCGCAGA |
| | | AAGAATCCCCAAGAGGGCCTGTACAACGAGCTCCAAAAGGAT |
| | | AAGATGGCAGAAGCCTATAGCGAGATTGGTATGAAAGGGGA |
| | | ACGCAGAAGAGGCAAAGGCCACGACGGACTGTACCAGGGAC |
| | | TCAGCACCGCCACCAAGGACACCTATGACGCTCTTCACATGC |
| | | AGGCCCTGCCGCCTCGG |

139107

| | | |
|---|---|---|
| 139107- aa | 47 | EVQLVETGGGVVQPGGSLRLSCAVSGFALSNHGMSWVRRAPGK |
| ScFv | | GLEWVSGIVYSGSTYYAASVKGRFTISRDNSRNTLYLQMNSLRP |
| domain | | EDTAIYYCSAHGGESDVWGQGTTVTVSSASGGGGSGGRASGGG |
| | | GSEIVLTQSPGTLSLSPGERATLSCRASQSVGSTNLAWYQQKPGQ |
| | | APRLLIYDASNRATGIPDRFSGGGSGTDFTLTISRLEPEDFAVYYC |
| | | QQYGSSPPWTFGQGTKVEIK |
| 139107- nt | 62 | GAAGTGCAATTGGTGGAGACTGGAGGAGGAGTGGTGCAACCT |
| ScFv | | GGAGGAAGCCTGAGACTGTCATGCGCGGTGTCGGGCTTCGCC |
| domain | | CTCTCCAACCACGGAATGTCCTGGGTCCGCCGGGCCCCTGGG |
| | | AAAGGACTTGAATGGGTGTCCGGCATCGTGTACTCGGGTTCC |
| | | ACCTACTACGCGGCCTCAGTGAAGGGCCGGTTTACTATTAGC |
| | | CGCGACAACTCCAGAAACACACTGTACCTCCAAATGAACTCG |
| | | CTGCGGCCGGAAGATACCGCTATCTACTACTGCTCCGCCCATG |
| | | GGGGAGAGTCGGACGTCTGGGGACAGGGCACCACTGTCACTG |
| | | TGTCCAGCGCTTCCGGCGGTGGTGGAAGCGGGGGACGGGCCT |
| | | CAGGAGGCGGTGGCAGCGAGATTGTGCTGACCCAGTCCCCCG |
| | | GGACCCTGAGCCTGTCCCCGGGAGAAAGGGCCACCCTCTCCT |
| | | GTCGGGCATCCCAGTCCGTGGGGTCTACTAACCTTGCATGGTA |
| | | CCAGCAGAAGCCCGGCCAGGCCCCTCGCCTGCTGATCTACGA |
| | | CGCGTCCAATAGAGCCACCGGCATCCCGGATCGCTTCAGCGG |
| | | AGGCGGATCGGGCACCGACTTCACCCTCACCATTTCAAGGCT |
| | | GGAACCGGAGGACTTCGCCGTGTACTACTGCCAGCAGTATGG |
| | | TTCGTCCCCACCCTGGACGTTCGGCCAGGGGACTAAGGTCGA |
| | | GATCAAG |
| 139107- aa | 77 | EVQLVETGGGVVQPGGSLRLSCAVSGFALSNHGMSWVRRAPGK |
| VH | | GLEWVSGIVYSGSTYYAASVKGRFTISRDNSRNTLYLQMNSLRP |
| | | EDTAIYYCSAHGGESDVWGQGTTVTVSS |
| 139107- aa | 92 | EIVLTQSPGTLSLSPGERATLSCRASQSVGSTNLAWYQQKPGQAP |
| VL | | RLLIYDASNRATGIPDRFSGGGSGTDFTLTISRLEPEDFAVYYCQQ |
| | | YGSSPPWTFGQGTKVEIK |
| 139107- aa | 107 | MALPVTALLLPLALLLHAARPEVQLVETGGGVVQPGGSLRLSCA |
| Full CAR | | VSGFALSNHGMSWVRRAPGKGLEWVSGIVYSGSTYYAASVKGR |
| | | FTISRDNSRNTLYLQMNSLRPEDTAIYYCSAHGGESDVWGQGTT |
| | | VTVSSASGGGGSGGRASGGGGSEIVLTQSPGTLSLSPGERATLSC |
| | | RASQSVGSTNLAWYQQKPGQAPRLLIYDASNRATGIPDRFSGGG |
| | | SGTDFTLTISRLEPEDFAVYYCQQYGSSPPWTFGQGTKVEIKTTT |
| | | PAPRPPTPAPTIASQPLSLRPEACRPAAGGAVHTRGLDFACDIYIW |
| | | APLAGTCGVLLLSLVITLYCKRGRKKLLYIFKQPFMRPVQTTQEE |
| | | DGCSCRFPEEEEGGCELRVKFSRSADAPAYKQGQNQLYNELNLG |
| | | RREEYDVLDKRRGRDPEMGGKPRRKNPQEGLYNELQKDKMAE |
| | | AYSEIGMKGERRRGKGHDGLYQGLSTATKDTYDALHMQALPPR |
| 139107- nt | 122 | ATGGCCCTCCCTGTCACCGCCCTGCTGCTTCCGCTGGCTCTTC |
| Full CAR | | TGCTCCACGCCGCTCGGCCCGAAGTGCAATTGGTGGAGACTG |
| | | GAGGAGGAGTGGTGCAACCTGGAGGAAGCCTGAGACTGTCAT |
| | | GCGCGGTGTCGGGCTTCGCCCTCTCCAACCACGGAATGTCCTG |
| | | GGTCCGCCGGGCCCCTGGGAAAGGACTTGAATGGGTGTCCGG |
| | | CATCGTGTACTCGGGTTCCACCTACTACGCGGCCTCAGTGAAG |
| | | GGCCGGTTTACTATTAGCCGCGACAACTCCAGAAACACACTG |
| | | TACCTCCAAATGAACTCGCTGCGGCCGGAAGATACCGCTATC |
| | | TACTACTGCTCCGCCCATGGGGGAGAGTCGGACGTCTGGGGA |
| | | CAGGGCACCACTGTCACTGTGTCCAGCGCTTCCGGCGGTGGT |
| | | GGAAGCGGGGGACGGGCCTCAGGAGGCGGTGGCAGCGAGAT |
| | | TGTGCTGACCCAGTCCCCCGGGACCCTGAGCCTGTCCCCGGG |
| | | AGAAAGGGCCACCCTCTCCTGTCGGGCATCCCAGTCCGTGGG |
| | | GTCTACTAACCTTGCATGGTACCAGCAGAAGCCCGGCCAGGC |
| | | CCCTCGCCTGCTGATCTACGACGCGTCCAATAGAGCCACCGG |
| | | CATCCCGGATCGCTTCAGCGGAGGCGGATCGGGCACCGACTT |
| | | CACCCTCACCATTTCAAGGCTGGAACCGGAGGACTTCGCCGT |
| | | GTACTACTGCCAGCAGTATGGTTCGTCCCCACCCTGGACGTTC |
| | | GGCCAGGGGACTAAGGTCGAGATCAAGACCACTACCCCAGCA |
| | | CCGAGGCCACCCACCCCGGCTCCTACCATCGCCTCCCAGCCTC |
| | | TGTCCCTGCGTCCGGAGGCATGTAGACCCGCAGCTGGTGGGG |
| | | CCGTGCATACCCGGGGTCTTGACTTCGCCTGCGATATCTACAT |
| | | TTGGGCCCCTCTGGCTGGTACTTGCGGGGTCCTGCTGCTTTCA |
| | | CTCGTGATCACTCTTTACTGTAAGCGCGGTCGGAAGAAGCTG |
| | | CTGTACATCTTTAAGCAACCCTTCATGAGGCCTGTGCAGACTA |
| | | CTCAAGAGGAGGACGGCTGTTCATGCCGGTTCCCAGAGGAGG |
| | | AGGAAGGCGGCTGCGAACTGCGCGTGAAATTCAGCCGCAGCG |
| | | CAGATGCTCCAGCCTACAAGCAGGGGCAGAACCAGCTCTACA |
| | | ACGAACTCAATCTTGGTCGGAGAGAGGAGTACGACGTGCTGG |
| | | ACAAGCGGAGAGGACGGGACCCAGAAATGGGCGGGAAGCCG |
| | | CGCAGAAAGAATCCCCAAGAGGGCCTGTACAACGAGCTCCAA |
| | | AAGGATAAGATGGCAGAAGCCTATAGCGAGATTGGTATGAA |
| | | AGGGGAACGCAGAAGAGGCAAAGGCCACGACGGACTGTACC |
| | | AGGGACTCAGCACCGCCACCAAGGACACCTATGACGCTCTTC |
| | | ACATGCAGGCCCTGCCGCCTCGG |

139108

| | | |
|---|---|---|
| 139108- aa | 48 | QVQLVESGGGLVKPGGSLRLSCAASGFTFSDYYMSWIRQAPGK |
| ScFv | | GLEWVSYISSSGSTIYYADSVKGRFTISRDNAKNSLYLQMNSLRA |
| domain | | EDTAVYYCARESGDGMDVWGQGTTVTVSSASGGGGSGGRASG |
| | | GGGSDIQMTQSPSSLSASVGDRVTITCRASQSISSYLNWYQQKPG |
| | | KAPKLLIYAASSLQSGVPSRFSGSGSGTDFTLTISSLQPEDFATYY |
| | | CQQSYTLAFGQGTKVDIK |
| 139108- nt | 63 | CAAGTGCAACTCGTGGAATCTGGTGGAGGACTCGTGAAACCT |
| ScFv | | GGAGGATCATTGAGACTGTCATGCGCGGCCTCGGGATTCACG |
| domain | | TTCTCCGATTACTACATGAGCTGGATTCGCCAGGCTCCGGGGA |
| | | AGGGACTGGAATGGGTGTCCTACATTTCCTCATCCGGCTCCAC |
| | | CATCTACTACGCGGACTCCGTGAAGGGGAGATTCACCATTAG |
| | | CCGCGATAACGCCAAGAACAGCCTGTACCTTCAGATGAACTC |
| | | CCTGCGGGCTGAAGATACTGCCGTCTACTACTGCGCAAGGGA |
| | | GAGCGGAGATGGGATGGACGTCTGGGGACAGGGTACCACTGT |
| | | GACCGTGTCGTCGGCCTCCGGCGGAGGGGGTTCGGGTGGAAG |
| | | GGCCAGCGGCGGCGGAGGCAGCGACATCCAGATGACCCAGT |
| | | CCCCCTCATCGCTGTCCGCCTCCGTGGGCGACCGCGTCACCAT |
| | | CACATGCCGGGCCTCACAGTCGATCTCCTCCTACCTCAATTGG |
| | | TATCAGCAGAAGCCCGGAAAGGCCCCTAAGCTTCTGATCTAC |
| | | GCAGCGTCCTCCCTGCAATCCGGGGTCCCATCTCGGTTCTCCG |
| | | GCTCGGGCAGCGGTACCGACTTCACTCTGACCATCTCGAGCCT |
| | | GCAGCCGGAGGACTTCGCCACTTACTACTGTCAGCAAAGCTA |
| | | CACCCTCGCGTTTGGCCAGGGCACCAAAGTGGACATCAAG |
| 139108- aa | 78 | QVQLVESGGGLVKPGGSLRLSCAASGFTFSDYYMSWIRQAPGK |
| VH | | GLEWVSYISSSGSTIYYADSVKGRFTISRDNAKNSLYLQMNSLRA |
| | | EDTAVYYCARESGDGMDVWGQGTTVTVSS |
| 139108- aa | 93 | DIQMTQSPSSLSASVGDRVTITCRASQSISSYLNWYQQKPGKAPK |
| VL | | LLIYAASSLQSGVPSRFSGSGSGTDFTLTISSLQPEDFATYYCQQS |
| | | YTLAFGQGTKVDIK |
| 139108- aa | 108 | MALPVTALLLPLALLLHAARPQVQLVESGGGLVKPGGSLRLSCA |
| Full CAR | | ASGFTFSDYYMSWIRQAPGKGLEWVSYISSSGSTIYYADSVKGR |
| | | FTISRDNAKNSLYLQMNSLRAEDTAVYYCARESGDGMDVWGQ |
| | | GTTVTVSSASGGGGSGGRASGGGGSDIQMTQSPSSLSASVGDRV |
| | | TITCRASQSISSYLNWYQQKPGKAPKLLIYAASSLQSGVPSRFSGS |
| | | GSGTDFTLTISSLQPEDFATYYCQQSYTLAFGQGTKVDIKTTTPA |
| | | PRPPTPAPTIASQPLSLRPEACRPAAGGAVHTRGLDFACDIYIWAP |
| | | LAGTCGVLLLSLVITLYCKRGRKKLLYIFKQPFMRPVQTTQEED |
| | | GCSCRFPEEEEGGCELRVKFSRSADAPAYKQGQNQLYNELNLGR |
| | | REEYDVLDKRRGRDPEMGGKPRRKNPQEGLYNELQKDKMAEA |
| | | YSEIGMKGERRRGKGHDGLYQGLSTATKDTYDALHMQALPPR |
| 139108- nt | 123 | ATGGCCCTCCCTGTCACCGCCCTGCTGCTTCCGCTGGCTCTTC |
| Full CAR | | TGCTCCACGCCGCTCGGCCCCAAGTGCAACTCGTGGAATCTG |
| | | GTGGAGGACTCGTGAAACCTGGAGGATCATTGAGACTGTCAT |
| | | GCGCGGCCTCGGGATTCACGTTCTCCGATTACTACATGAGCTG |
| | | GATTCGCCAGGCTCCGGGGAAGGGACTGGAATGGGTGTCCTA |
| | | CATTTCCTCATCCGGCTCCACCATCTACTACGCGGACTCCGTG |
| | | AAGGGGAGATTCACCATTAGCCGCGATAACGCCAAGAACAGC |
| | | CTGTACCTTCAGATGAACTCCCTGCGGGCTGAAGATACTGCC |
| | | GTCTACTACTGCGCAAGGGAGAGCGGAGATGGGATGGACGTC |
| | | TGGGGACAGGGTACCACTGTGACCGTGTCGTCGGCCTCCGGC |
| | | GGAGGGGGTTCGGGTGGAAGGGCCAGCGGCGGCGGAGGCAG |
| | | CGACATCCAGATGACCCAGTCCCCCTCATCGCTGTCCGCCTCC |
| | | GTGGGCGACCGCGTCACCATCACATGCCGGGCCTCACAGTCG |
| | | ATCTCCTCCTACCTCAATTGGTATCAGCAGAAGCCCGGAAAG |
| | | GCCCCTAAGCTTCTGATCTACGCAGCGTCCTCCCTGCAATCCG |
| | | GGGTCCCATCTCGGTTCTCCGGCTCGGGCAGCGGTACCGACTT |
| | | CACTCTGACCATCTCGAGCCTGCAGCCGGAGGACTTCGCCAC |
| | | TTACTACTGTCAGCAAAGCTACACCCTCGCGTTTGGCCAGGGC |
| | | ACCAAAGTGGACATCAAGACCACTACCCCAGCACCGAGGCCA |
| | | CCCACCCCGGCTCCTACCATCGCCTCCCAGCCTCTGTCCCTGC |
| | | GTCCGGAGGCATGTAGACCCGCAGCTGGTGGGGCCGTGCATA |
| | | CCCGGGGTCTTGACTTCGCCTGCGATATCTACATTTGGGCCCC |
| | | TCTGGCTGGTACTTGCGGGGTCCTGCTGCTTTCACTCGTGATC |
| | | ACTCTTTACTGTAAGCGCGGTCGGAAGAAGCTGCTGTACATCT |
| | | TTAAGCAACCCTTCATGAGGCCTGTGCAGACTACTCAAGAGG |
| | | AGGACGGCTGTTCATGCCGGTTCCCAGAGGAGGAGGAAGGCG |
| | | GCTGCGAACTGCGCGTGAAATTCAGCCGCAGCGCAGATGCTC |
| | | CAGCCTACAAGCAGGGGCAGAACCAGCTCTACAACGAACTCA |
| | | ATCTTGGTCGGAGAGAGGAGTACGACGTGCTGGACAAGCGGA |
| | | GAGGACGGGACCCAGAAATGGGCGGGAAGCCGCGCAGAAAG |
| | | AATCCCCAAGAGGGCCTGTACAACGAGCTCCAAAAGGATAAG |
| | | ATGGCAGAAGCCTATAGCGAGATTGGTATGAAAGGGGAACG |
| | | CAGAAGAGGCAAAGGCCACGACGGACTGTACCAGGGACTCA |
| | | GCACCGCCACCAAGGACACCTATGACGCTCTTCACATGCAGG |
| | | CCCTGCCGCCTCGG |

139110

| | | |
|---|---|---|
| 139110- aa | 50 | QVQLVQSGGGLVKPGGSLRLSCAASGFTFSDYYMSWIRQAPGK |
| ScFv | | GLEWVSYISSSGNTIYYADSVKGRFTISRDNAKNSLYLQMNSLR |
| domain | | AEDTAVYYCARSTMVREDYWGQGTLVTVSSASGGGGSGGRAS |
| | | GGGGSDIVLTQSPLSLPVTLGQPASISCKSSESLVHNSGKTYLNW |
| | | FHQRPGQSPRRLIYEVSNRDSGVPDRFTGSGSGTDFTLKISRVEA |
| | | EDVGVYYCMQGTHWPGTFGQGTKLEIK |
| 139110- nt | 65 | CAAGTGCAACTGGTGCAAAGCGGAGGAGGATTGGTCAAACCC |
| ScFv | | GGAGGAAGCCTGAGACTGTCATGCGCGGCCTCTGGATTCACC |
| domain | | TTCTCCGATTACTACATGTCATGGATCAGACAGGCCCCGGGG |
| | | AAGGGCCTCGAATGGGTGTCCTACATCTCGTCCTCCGGGAAC |
| | | ACCATCTACTACGCCGACAGCGTGAAGGGCCGCTTTACCATTT |
| | | CCCGCGACAACGCAAAGAACTCGCTGTACCTTCAGATGAATT |
| | | CCCTGCGGGCTGAAGATACCGCGGTGTACTATTGCGCCCGGT |
| | | CCACTATGGTCCGGGAGGACTACTGGGGACAGGGCACACTCG |
| | | TGACCGTGTCCAGCGCGAGCGGGGGTGGAGGCAGCGGTGGA |
| | | CGCGCCTCCGGCGGCGGCGGTTCAGACATCGTGCTGACTCAG |
| | | TCGCCCCTGTCGCTGCCGGTCACCCTGGGCCAACCGGCCTCAA |
| | | TTAGCTGCAAGTCCTCGGAGAGCCTGGTGCACAACTCAGGAA |
| | | AGACTTACCTGAACTGGTTCCATCAGCGGCCTGGACAGTCCC |
| | | CACGGAGGCTCATCTATGAAGTGTCCAACAGGGATTCGGGGG |
| | | TGCCCGACCGCTTCACTGGCTCCGGGTCCGGCACCGACTTCAC |
| | | CTTGAAAATCTCCAGAGTGGAAGCCGAGGACGTGGGCGTGTA |
| | | CTACTGTATGCAGGGTACCCACTGGCCTGGAACCTTTGGACA |
| | | AGGAACTAAGCTCGAGATTAAG |
| 139110- aa | 80 | QVQLVQSGGGLVKPGGSLRLSCAASGFTFSDYYMSWIRQAPGK |
| VH | | GLEWVSYISSSGNTIYYADSVKGRFTISRDNAKNSLYLQMNSLR |
| | | AEDTAVYYCARSTMVREDYWGQGTLVTVSS |
| 139110- aa | 95 | DIVLTQSPLSLPVTLGQPASISCKSSESLVHNSGKTYLNWFHQRP |
| VL | | GQSPRRLIYEVSNRDSGVPDRFTGSGSGTDFTLKISRVEAEDVGV |
| | | YYCMQGTHWPGTFGQGTKLEIK |
| 139110- aa | 110 | MALPVTALLLPLALLLHAARPQVQLVQSGGGLVKPGGSLRLSCA |
| Full CAR | | ASGFTFSDYYMSWIRQAPGKGLEWVSYISSSGNTIYYADSVKGR |
| | | FTISRDNAKNSLYLQMNSLRAEDTAVYYCARSTMVREDYWGQ |
| | | GTLVTVSSASGGGGSGGRASGGGGSDIVLTQSPLSLPVTLGQPAS |
| | | ISCKSSESLVHNSGKTYLNWFHQRPGQSPRRLIYEVSNRDSGVPD |
| | | RFTGSGSGTDFTLKISRVEAEDVGVYYCMQGTHWPGTFGQGTK |
| | | LEIKTTTPAPRPPTPAPTIASQPLSLRPEACRPAAGGAVHTRGLDF |
| | | ACDIYIWAPLAGTCGVLLLSLVITLYCKRGRKKLLYIFKQPFMRP |
| | | VQTTQEEDGCSCRFPEEEEGGCELRVKFSRSADAPAYKQGQNQL |
| | | YNELNLGRREEYDVLDKRRGRDPEMGGKPRRKNPQEGLYNELQ |
| | | KDKMAEAYSEIGMKGERRRGKGHDGLYQGLSTATKDTYDALH |
| | | MQALPPR |
| 139110- nt | 125 | ATGGCCCTCCCTGTCACCGCCCTGCTGCTTCCGCTGGCTCTTC |
| Full CAR | | TGCTCCACGCCGCTCGGCCCCAAGTGCAACTGGTGCAAAGCG |
| | | GAGGAGGATTGGTCAAACCCGGAGGAAGCCTGAGACTGTCAT |
| | | GCGCGGCCTCTGGATTCACCTTCTCCGATTACTACATGTCATG |
| | | GATCAGACAGGCCCCGGGGAAGGGCCTCGAATGGGTGTCCTA |
| | | CATCTCGTCCTCCGGGAACACCATCTACTACGCCGACAGCGT |
| | | GAAGGGCCGCTTTACCATTTCCCGCGACAACGCAAAGAACTC |
| | | GCTGTACCTTCAGATGAATTCCCTGCGGGCTGAAGATACCGC |
| | | GGTGTACTATTGCGCCCGGTCCACTATGGTCCGGGAGGACTA |
| | | CTGGGGACAGGGCACACTCGTGACCGTGTCCAGCGCGAGCGG |
| | | GGGTGGAGGCAGCGGTGGACGCGCCTCCGGCGGCGGCGGTTC |
| | | AGACATCGTGCTGACTCAGTCGCCCCTGTCGCTGCCGGTCACC |
| | | CTGGGCCAACCGGCCTCAATTAGCTGCAAGTCCTCGGAGAGC |
| | | CTGGTGCACAACTCAGGAAAGACTTACCTGAACTGGTTCCAT |
| | | CAGCGGCCTGGACAGTCCCCACGGAGGCTCATCTATGAAGTG |
| | | TCCAACAGGGATTCGGGGGTGCCCGACCGCTTCACTGGCTCC |
| | | GGGTCCGGCACCGACTTCACCTTGAAAATCTCCAGAGTGGAA |
| | | GCCGAGGACGTGGGCGTGTACTACTGTATGCAGGGTACCCAC |
| | | TGGCCTGGAACCTTTGGACAAGGAACTAAGCTCGAGATTAAG |
| | | ACCACTACCCCAGCACCGAGGCCACCCACCCCGGCTCCTACC |
| | | ATCGCCTCCCAGCCTCTGTCCCTGCGTCCGGAGGCATGTAGAC |
| | | CCGCAGCTGGTGGGGCCGTGCATACCCGGGGTCTTGACTTCG |
| | | CCTGCGATATCTACATTTGGGCCCCTCTGGCTGGTACTTGCGG |
| | | GGTCCTGCTGCTTTCACTCGTGATCACTCTTTACTGTAAGCGC |
| | | GGTCGGAAGAAGCTGCTGTACATCTTTAAGCAACCCTTCATG |
| | | AGGCCTGTGCAGACTACTCAAGAGGAGGACGGCTGTTCATGC |
| | | CGGTTCCCAGAGGAGGAGGAAGGCGGCTGCGAACTGCGCGT |
| | | GAAATTCAGCCGCAGCGCAGATGCTCCAGCCTACAAGCAGGG |
| | | GCAGAACCAGCTCTACAACGAACTCAATCTTGGTCGGAGAGA |
| | | GGAGTACGACGTGCTGGACAAGCGGAGAGGACGGGACCCAG |
| | | AAATGGGCGGGAAGCCGCGCAGAAAGAATCCCCAAGAGGGC |
| | | CTGTACAACGAGCTCCAAAAGGATAAGATGGCAGAAGCCTAT |
| | | AGCGAGATTGGTATGAAAGGGGAACGCAGAAGAGGCAAAGG |
| | | CCACGACGGACTGTACCAGGGACTCAGCACCGCCACCAAGGA |
| | | CACCTATGACGCTCTTCACATGCAGGCCCTGCCGCCTCGG |

139112

| | | |
|---|---|---|
| 139112- aa | 51 | QVQLVESGGGLVQPGGSLRLSCAVSGFALSNHGMSWVRRAPGK |
| ScFv | | GLEWVSGIVYSGSTYYAASVKGRFTISRDNSRNTLYLQMNSLRP |
| domain | | EDTAIYYCSAHGGESDVWGQGTTVTVSSASGGGGSGGRASGGG |
| | | GSDIRLTQSPSPLSASVGDRVTITCQASEDINKFLNWYHQTPGKA |
| | | PKLLIYDASTLQTGVPSRFSGSGSGTDFTLTINSLQPEDIGTYYCQ |
| | | QYESLPLTFGGGTKVEIK |
| 139112- nt | 66 | CAAGTGCAACTCGTGGAATCTGGTGGAGGACTCGTGCAACCC |
| ScFv | | GGTGGAAGCCTTAGGCTGTCGTGCGCCGTCAGCGGGTTTGCT |
| domain | | CTGAGCAACCATGGAATGTCCTGGGTCCGCCGGGCACCGGGA |
| | | AAAGGGCTGGAATGGGTGTCCGGCATCGTGTACAGCGGGTCA |
| | | ACCTATTACGCCGCGTCCGTGAAGGGCAGATTCACTATCTCA |
| | | AGAGACAACAGCCGGAACACCCTGTACTTGCAAATGAATTCC |
| | | CTGCGCCCCGAGGACACCGCCATCTACTACTGCTCCGCCCAC |
| | | GGAGGAGAGTCGGACGTGTGGGGCCAGGGAACGACTGTGAC |
| | | TGTGTCCAGCGCATCAGGAGGGGGTGGTTCGGGCGGCCGGGC |
| | | CTCGGGGGGAGGAGGTTCCGACATTCGGCTGACCCAGTCCCC |
| | | GTCCCCACTGTCGGCCTCCGTCGGCGACCGCGTGACCATCACT |
| | | TGTCAGGCGTCCGAGGACATTAACAAGTTCCTGAACTGGTAC |
| | | CACCAGACCCCTGGAAAGGCCCCCAAGCTGCTGATCTACGAT |
| | | GCCTCGACCCTTCAAACTGGAGTGCCTAGCCGGTTCTCCGGGT |
| | | CCGGCTCCGGCACTGATTTCACTCTGACCATCAACTCATTGCA |
| | | GCCGGAAGATATCGGGACCTACTATTGCCAGCAGTACGAATC |
| | | CCTCCCGCTCACATTCGGCGGGGGAACCAAGGTCGAGATTAA |
| | | G |
| 139112- aa | 81 | QVQLVESGGGLVQPGGSLRLSCAVSGFALSNHGMSWVRRAPGK |
| VH | | GLEWVSGIVYSGSTYYAASVKGRFTISRDNSRNTLYLQMNSLRP |
| | | EDTAIYYCSAHGGESDVWGQGTTVTVSS |
| 139112- aa | 96 | DIRLTQSPSPLSASVGDRVTITCQASEDINKFLNWYHQTPGKAPK |
| VL | | LLIYDASTLQTGVPSRFSGSGSGTDFTLTINSLQPEDIGTYYCQQY |
| | | ESLPLTFGGGTKVEIK |
| 139112- aa | 111 | MALPVTALLLPLALLLHAARPQVQLVESGGGLVQPGGSLRLSCA |
| Full CAR | | VSGFALSNHGMSWVRRAPGKGLEWVSGIVYSGSTYYAASVKGR |
| | | FTISRDNSRNTLYLQMNSLRPEDTAIYYCSAHGGESDVWGQGTT |
| | | VTVSSASGGGGSGGRASGGGGSDIRLTQSPSPLSASVGDRVTITC |
| | | QASEDINKFLNWYHQTPGKAPKLLIYDASTLQTGVPSRFSGSGSG |
| | | TDFTLTINSLQPEDIGTYYCQQYESLPLTFGGGTKVEIKTTTPAPR |
| | | PPTPAPTIASQPLSLRPEACRPAAGGAVHTRGLDFACDIYIWAPL |
| | | AGTCGVLLLSLVITLYCKRGRKKLLYIFKQPFMRPVQTTQEEDG |
| | | CSCRFPEEEEGGCELRVKFSRSADAPAYKQGQNQLYNELNLGRR |
| | | EEYDVLDKRRGRDPEMGGKPRRKNPQEGLYNELQKDKMAEAY |
| | | SEIGMKGERRRGKGHDGLYQGLSTATKDTYDALHMQALPPR |
| 139112- nt | 126 | ATGGCCCTCCCTGTCACCGCCCTGCTGCTTCCGCTGGCTCTTC |
| Full CAR | | TGCTCCACGCCGCTCGGCCCCAAGTGCAACTCGTGGAATCTG |
| | | GTGGAGGACTCGTGCAACCCGGTGGAAGCCTTAGGCTGTCGT |
| | | GCGCCGTCAGCGGGTTTGCTCTGAGCAACCATGGAATGTCCT |
| | | GGGTCCGCCGGGCACCGGGAAAAGGGCTGGAATGGGTGTCC |
| | | GGCATCGTGTACAGCGGGTCAACCTATTACGCCGCGTCCGTG |
| | | AAGGGCAGATTCACTATCTCAAGAGACAACAGCCGGAACACC |
| | | CTGTACTTGCAAATGAATTCCCTGCGCCCCGAGGACACCGCC |
| | | ATCTACTACTGCTCCGCCCACGGAGGAGAGTCGGACGTGTGG |
| | | GGCCAGGGAACGACTGTGACTGTGTCCAGCGCATCAGGAGGG |
| | | GGTGGTTCGGGCGGCCGGGCCTCGGGGGGAGGAGGTTCCGAC |
| | | ATTCGGCTGACCCAGTCCCCGTCCCCACTGTCGGCCTCCGTCG |
| | | GCGACCGCGTGACCATCACTTGTCAGGCGTCCGAGGACATTA |
| | | ACAAGTTCCTGAACTGGTACCACCAGACCCCTGGAAAGGCCC |
| | | CCAAGCTGCTGATCTACGATGCCTCGACCCTTCAAACTGGAGT |
| | | GCCTAGCCGGTTCTCCGGGTCCGGCTCCGGCACTGATTTCACT |
| | | CTGACCATCAACTCATTGCAGCCGGAAGATATCGGGACCTAC |
| | | TATTGCCAGCAGTACGAATCCCTCCCGCTCACATTCGGCGGG |
| | | GGAACCAAGGTCGAGATTAAGACCACTACCCCAGCACCGAGG |
| | | CCACCCACCCCGGCTCCTACCATCGCCTCCCAGCCTCTGTCCC |
| | | TGCGTCCGGAGGCATGTAGACCCGCAGCTGGTGGGGCCGTGC |
| | | ATACCCGGGGTCTTGACTTCGCCTGCGATATCTACATTTGGGC |
| | | CCCTCTGGCTGGTACTTGCGGGGTCCTGCTGCTTTCACTCGTG |
| | | ATCACTCTTTACTGTAAGCGCGGTCGGAAGAAGCTGCTGTAC |
| | | ATCTTTAAGCAACCCTTCATGAGGCCTGTGCAGACTACTCAAG |
| | | AGGAGGACGGCTGTTCATGCCGGTTCCCAGAGGAGGAGGAA |
| | | GGCGGCTGCGAACTGCGCGTGAAATTCAGCCGCAGCGCAGAT |
| | | GCTCCAGCCTACAAGCAGGGGCAGAACCAGCTCTACAACGAA |
| | | CTCAATCTTGGTCGGAGAGAGGAGTACGACGTGCTGGACAAG |
| | | CGGAGAGGACGGGACCCAGAAATGGGCGGGAAGCCGCGCAG |
| | | AAAGAATCCCCAAGAGGGCCTGTACAACGAGCTCCAAAAGG |
| | | ATAAGATGGCAGAAGCCTATAGCGAGATTGGTATGAAAGGG |
| | | GAACGCAGAAGAGGCAAAGGCCACGACGGACTGTACCAGGG |
| | | ACTCAGCACCGCCACCAAGGACACCTATGACGCTCTTCACAT |
| | | GCAGGCCCTGCCGCCTCGG |

139113

| | | |
|---|---|---|
| 139113- aa | 52 | EVQLVETGGGLVQPGGSLRLSCAVSGFALSNHGMSWVRRAPGK |
| ScFv | | GLEWVSGIVYSGSTYYAASVKGRFTISRDNSRNTLYLQMNSLRP |
| domain | | EDTAIYYCSAHGGESDVWGQGTTVTVSSASGGGGSGGRASGGG |
| | | GSETTLTQSPATLSVSPGERATLSCRASQSVGSNLAWYQQKPGQ |
| | | GPRLLIYGASTRATGIPARFSGSGSGTEFTLTISSLQPEDFAVYYC |
| | | QQYNDWLPVTFGQGTKVEIK |
| 139113- nt | 67 | GAAGTGCAATTGGTGGAAACTGGAGGAGGACTTGTGCAACCT |
| ScFv | | GGAGGATCATTGCGGCTCTCATGCGCTGTCTCCGGCTTCGCCC |
| domain | | TGTCAAATCACGGGATGTCGTGGGTCAGACGGGCCCCGGGAA |
| | | AGGGTCTGGAATGGGTGTCGGGGATTGTGTACAGCGGCTCCA |
| | | CCTACTACGCCGCTTCGGTCAAGGGCCGCTTCACTATTTCACG |
| | | GGACAACAGCCGCAACACCCTCTATCTGCAAATGAACTCTCT |
| | | CCGCCCGGAGGATACCGCCATCTACTACTGCTCCGCACACGG |
| | | CGGCGAATCCGACGTGTGGGGACAGGGAACCACTGTCACCGT |
| | | GTCGTCCGCATCCGGTGGCGGAGGATCGGGTGGCCGGGCCTC |
| | | CGGGGGCGGCGGCAGCGAGACTACCCTGACCCAGTCCCCTGC |
| | | CACTCTGTCCGTGAGCCCGGGAGAGAGAGCCACCCTTAGCTG |
| | | CCGGGCCAGCCAGAGCGTGGGCTCCAACCTGGCCTGGTACCA |
| | | GCAGAAGCCAGGACAGGGTCCCAGGCTGCTGATCTACGGAGC |
| | | CTCCACTCGCGCGACCGGCATCCCCGCGAGGTTCTCCGGGTC |
| | | GGGTTCCGGGACCGAGTTCACCCTGACCATCTCCTCCCTCCAA |
| | | CCGGAGGACTTCGCGGTGTACTACTGTCAGCAGTACAACGAT |
| | | TGGCTGCCCGTGACATTTGGACAGGGGACGAAGGTGGAAATC |
| | | AAA |
| 139113- aa | 82 | EVQLVETGGGLVQPGGSLRLSCAVSGFALSNHGMSWVRRAPGK |
| VH | | GLEWVSGIVYSGSTYYAASVKGRFTISRDNSRNTLYLQMNSLRP |
| | | EDTAIYYCSAHGGESDVWGQGTTVTVSS |
| 139113- aa | 97 | ETTLTQSPATLSVSPGERATLSCRASQSVGSNLAWYQQKPGQGP |
| VL | | RLLIYGASTRATGIPARFSGSGSGTEFTLTISSLQPEDFAVYYCQQ |
| | | YNDWLPVTFGQGTKVEIK |
| 139113- aa | 112 | MALPVTALLLPLALLLHAARPEVQLVETGGGLVQPGGSLRLSCA |
| Full CAR | | VSGFALSNHGMSWVRRAPGKGLEWVSGIVYSGSTYYAASVKGR |
| | | FTISRDNSRNTLYLQMNSLRPEDTAIYYCSAHGGESDVWGQGTT |
| | | VTVSSASGGGGSGGRASGGGGSETTLTQSPATLSVSPGERATLSC |
| | | RASQSVGSNLAWYQQKPGQGPRLLIYGASTRATGIPARFSGSGS |
| | | GTEFTLTISSLQPEDFAVYYCQQYNDWLPVTFGQGTKVEIKTTTP |
| | | APRPPTPAPTIASQPLSLRPEACRPAAGGAVHTRGLDFACDIYIW |
| | | APLAGTCGVLLLSLVITLYCKRGRKKLLYIFKQPFMRPVQTTQEE |
| | | DGCSCRFPEEEEGGCELRVKFSRSADAPAYKQGQNQLYNELNLG |
| | | RREEYDVLDKRRGRDPEMGGKPRRKNPQEGLYNELQKDKMAE |
| | | AYSEIGMKGERRRGKGHDGLYQGLSTATKDTYDALHMQALPPR |
| 139113- nt | 127 | ATGGCCCTCCCTGTCACCGCCCTGCTGCTTCCGCTGGCTCTTC |
| Full CAR | | TGCTCCACGCCGCTCGGCCCGAAGTGCAATTGGTGGAAACTG |
| | | GAGGAGGACTTGTGCAACCTGGAGGATCATTGCGGCTCTCAT |
| | | GCGCTGTCTCCGGCTTCGCCCTGTCAAATCACGGGATGTCGTG |
| | | GGTCAGACGGGCCCCGGGAAAGGGTCTGGAATGGGTGTCGG |
| | | GGATTGTGTACAGCGGCTCCACCTACTACGCCGCTTCGGTCAA |
| | | GGGCCGCTTCACTATTTCACGGGACAACAGCCGCAACACCCT |
| | | CTATCTGCAAATGAACTCTCTCCGCCCGGAGGATACCGCCATC |
| | | TACTACTGCTCCGCACACGGCGGCGAATCCGACGTGTGGGGA |
| | | CAGGGAACCACTGTCACCGTGTCGTCCGCATCCGGTGGCGGA |
| | | GGATCGGGTGGCCGGGCCTCCGGGGGCGGCGGCAGCGAGAC |
| | | TACCCTGACCCAGTCCCCTGCCACTCTGTCCGTGAGCCCGGGA |
| | | GAGAGAGCCACCCTTAGCTGCCGGGCCAGCCAGAGCGTGGGC |
| | | TCCAACCTGGCCTGGTACCAGCAGAAGCCAGGACAGGGTCCC |
| | | AGGCTGCTGATCTACGGAGCCTCCACTCGCGCGACCGGCATC |
| | | CCCGCGAGGTTCTCCGGGTCGGGTTCCGGGACCGAGTTCACC |
| | | CTGACCATCTCCTCCCTCCAACCGGAGGACTTCGCGGTGTACT |
| | | ACTGTCAGCAGTACAACGATTGGCTGCCCGTGACATTTGGAC |
| | | AGGGGACGAAGGTGGAAATCAAAACCACTACCCCAGCACCG |
| | | AGGCCACCCACCCCGGCTCCTACCATCGCCTCCCAGCCTCTGT |
| | | CCCTGCGTCCGGAGGCATGTAGACCCGCAGCTGGTGGGGCCG |
| | | TGCATACCCGGGGTCTTGACTTCGCCTGCGATATCTACATTTG |
| | | GGCCCCTCTGGCTGGTACTTGCGGGGTCCTGCTGCTTTCACTC |
| | | GTGATCACTCTTTACTGTAAGCGCGGTCGGAAGAAGCTGCTG |
| | | TACATCTTTAAGCAACCCTTCATGAGGCCTGTGCAGACTACTC |
| | | AAGAGGAGGACGGCTGTTCATGCCGGTTCCCAGAGGAGGAG |
| | | GAAGGCGGCTGCGAACTGCGCGTGAAATTCAGCCGCAGCGCA |
| | | GATGCTCCAGCCTACAAGCAGGGGCAGAACCAGCTCTACAAC |
| | | GAACTCAATCTTGGTCGGAGAGAGGAGTACGACGTGCTGGAC |
| | | AAGCGGAGAGGACGGGACCCAGAAATGGGCGGGAAGCCGCG |
| | | CAGAAAGAATCCCCAAGAGGGCCTGTACAACGAGCTCCAAA |
| | | AGGATAAGATGGCAGAAGCCTATAGCGAGATTGGTATGAAA |
| | | GGGGAACGCAGAAGAGGCAAAGGCCACGACGGACTGTACCA |
| | | GGGACTCAGCACCGCCACCAAGGACACCTATGACGCTCTTCA |
| | | CATGCAGGCCCTGCCGCCTCGG |

139114

| | | |
|---|---|---|
| 139114- aa | 53 | EVQLVESGGGLVQPGGSLRLSCAVSGFALSNHGMSWVRRAPGK |
| ScFv | | GLEWVSGIVYSGSTYYAASVKGRFTISRDNSRNTLYLQMNSLRP |
| domain | | EDTAIYYCSAHGGESDVWGQGTTVTVSSASGGGGSGGRASGGG |
| | | GSEIVLTQSPGTLSLSPGERATLSCRASQSIGSSSLAWYQQKPGQ |
| | | APRLLMYGASSRASGIPDRFSGSGSGTDFTLTISRLEPEDFAVYYC |
| | | QQYAGSPPFTFGQGTKVEIK |
| 139114- nt | 68 | GAAGTGCAATTGGTGGAATCTGGTGGAGGACTTGTGCAACCT |
| ScFv | | GGAGGATCACTGAGACTGTCATGCGCGGTGTCCGGTTTTGCC |
| domain | | CTGAGCAATCATGGGATGTCGTGGGTCCGGCGCGCCCCCGGA |
| | | AAGGGTCTGGAATGGGTGTCGGGTATCGTCTACTCCGGGAGC |
| | | ACTTACTACGCCGCGAGCGTGAAGGGCCGCTTCACCATTTCCC |
| | | GCGATAACTCCCGCAACACCCTGTACTTGCAAATGAACTCGC |
| | | TCCGGCCTGAGGACACTGCCATCTACTACTGCTCCGCACACG |
| | | GAGGAGAATCCGACGTGTGGGGCCAGGGAACTACCGTGACC |
| | | GTCAGCAGCGCCTCCGGCGGCGGGGGCTCAGGCGGACGGGCT |
| | | AGCGGCGGCGGTGGCTCCGAGATCGTGCTGACCCAGTCGCCT |
| | | GGCACTCTCTCGCTGAGCCCCGGGGAAAGGGCAACCCTGTCC |
| | | TGTCGGGCCAGCCAGTCCATTGGATCATCCTCCCTCGCCTGGT |
| | | ATCAGCAGAAACCGGGACAGGCTCCGCGGCTGCTTATGTATG |
| | | GGGCCAGCTCAAGAGCCTCCGGCATTCCCGACCGGTTCTCCG |
| | | GGTCCGGTTCCGGCACCGATTTCACCCTGACTATCTCGAGGCT |
| | | GGAGCCAGAGGACTTCGCCGTGTACTACTGCCAGCAGTACGC |
| | | GGGGTCCCCGCCGTTCACGTTCGGACAGGGAACCAAGGTCGA |
| | | GATCAAG |
| 139114- aa | 83 | EVQLVESGGGLVQPGGSLRLSCAVSGFALSNHGMSWVRRAPGK |
| VH | | GLEWVSGIVYSGSTYYAASVKGRFTISRDNSRNTLYLQMNSLRP |
| | | EDTAIYYCSAHGGESDVWGQGTTVTVSS |
| 139114- aa | 98 | EIVLTQSPGTLSLSPGERATLSCRASQSIGSSSLAWYQQKPGQAPR |
| VL | | LLMYGASSRASGIPDRFSGSGSGTDFTLTISRLEPEDFAVYYCQQ |
| | | YAGSPPFTFGQGTKVEIK |
| 139114- aa | 113 | MALPVTALLLPLALLLHAARPEVQLVESGGGLVQPGGSLRLSCA |
| Full CAR | | VSGFALSNHGMSWVRRAPGKGLEWVSGIVYSGSTYYAASVKGR |
| | | FTISRDNSRNTLYLQMNSLRPEDTAIYYCSAHGGESDVWGQGTT |
| | | VTVSSASGGGGSGGRASGGGGSEIVLTQSPGTLSLSPGERATLSC |
| | | RASQSIGSSSLAWYQQKPGQAPRLLMYGASSRASGIPDRFSGSGS |
| | | GTDFTLTISRLEPEDFAVYYCQQYAGSPPFTFGQGTKVEIKTTTP |
| | | APRPPTPAPTIASQPLSLRPEACRPAAGGAVHTRGLDFACDIYIW |
| | | APLAGTCGVLLLSLVITLYCKRGRKKLLYIFKQPFMRPVQTTQEE |
| | | DGCSCRFPEEEEGGCELRVKFSRSADAPAYKQGQNQLYNELNLG |
| | | RREEYDVLDKRRGRDPEMGGKPRRKNPQEGLYNELQKDKMAE |
| | | AYSEIGMKGERRRGKGHDGLYQGLSTATKDTYDALHMQALPPR |
| 139114- nt | 128 | ATGGCCCTCCCTGTCACCGCCCTGCTGCTTCCGCTGGCTCTTC |
| Full CAR | | TGCTCCACGCCGCTCGGCCCGAAGTGCAATTGGTGGAATCTG |
| | | GTGGAGGACTTGTGCAACCTGGAGGATCACTGAGACTGTCAT |
| | | GCGCGGTGTCCGGTTTTGCCCTGAGCAATCATGGGATGTCGTG |
| | | GGTCCGGCGCGCCCCCGGAAAGGGTCTGGAATGGGTGTCGGG |
| | | TATCGTCTACTCCGGGAGCACTTACTACGCCGCGAGCGTGAA |
| | | GGGCCGCTTCACCATTTCCCGCGATAACTCCCGCAACACCCTG |
| | | TACTTGCAAATGAACTCGCTCCGGCCTGAGGACACTGCCATCT |
| | | ACTACTGCTCCGCACACGGAGGAGAATCCGACGTGTGGGGCC |
| | | AGGGAACTACCGTGACCGTCAGCAGCGCCTCCGGCGGCGGGG |
| | | GCTCAGGCGGACGGGCTAGCGGCGGCGGTGGCTCCGAGATCG |
| | | TGCTGACCCAGTCGCCTGGCACTCTCTCGCTGAGCCCCGGGG |
| | | AAAGGGCAACCCTGTCCTGTCGGGCCAGCCAGTCCATTGGAT |
| | | CATCCTCCCTCGCCTGGTATCAGCAGAAACCGGGACAGGCTC |
| | | CGCGGCTGCTTATGTATGGGGCCAGCTCAAGAGCCTCCGGCA |
| | | TTCCCGACCGGTTCTCCGGGTCCGGTTCCGGCACCGATTTCAC |
| | | CCTGACTATCTCGAGGCTGGAGCCAGAGGACTTCGCCGTGTA |
| | | CTACTGCCAGCAGTACGCGGGGTCCCCGCCGTTCACGTTCGG |
| | | ACAGGGAACCAAGGTCGAGATCAAGACCACTACCCCAGCACC |
| | | GAGGCCACCCACCCCGGCTCCTACCATCGCCTCCCAGCCTCTG |
| | | TCCCTGCGTCCGGAGGCATGTAGACCCGCAGCTGGTGGGGCC |
| | | GTGCATACCCGGGGTCTTGACTTCGCCTGCGATATCTACATTT |
| | | GGGCCCCTCTGGCTGGTACTTGCGGGGTCCTGCTGCTTTCACT |
| | | CGTGATCACTCTTTACTGTAAGCGCGGTCGGAAGAAGCTGCT |
| | | GTACATCTTTAAGCAACCCTTCATGAGGCCTGTGCAGACTACT |
| | | CAAGAGGAGGACGGCTGTTCATGCCGGTTCCCAGAGGAGGAG |
| | | GAAGGCGGCTGCGAACTGCGCGTGAAATTCAGCCGCAGCGCA |
| | | GATGCTCCAGCCTACAAGCAGGGGCAGAACCAGCTCTACAAC |
| | | GAACTCAATCTTGGTCGGAGAGAGGAGTACGACGTGCTGGAC |
| | | AAGCGGAGAGGACGGGACCCAGAAATGGGCGGGAAGCCGCG |
| | | CAGAAAGAATCCCCAAGAGGGCCTGTACAACGAGCTCCAAA |
| | | AGGATAAGATGGCAGAAGCCTATAGCGAGATTGGTATGAAA |
| | | GGGGAACGCAGAAGAGGCAAAGGCCACGACGGACTGTACCA |
| | | GGGACTCAGCACCGCCACCAAGGACACCTATGACGCTCTTCA |
| | | CATGCAGGCCCTGCCGCCTCGG |

149362

| | | |
|---|---|---|
| 149362-aa | 129 | QVQLQESGPGLVKPSETLSLTCTVSGGSISSSYYYWGWIRQPPGK |
| ScFv | | GLEWIGSIYYSGSAYYNPSLKSRVTISVDTSKNQFSLRLSSVTAA |
| domain | | DTAVYYCARHWQEWPDAFDIWGQGTMVTVSSGGGGSGGGGS |
| | | GGGGSETTLTQSPAFMSATPGDKVIISCKASQDIDDAMNWYQQK |
| | | PGEAPLFIIQSATSPVPGIPPRFSGSGFGTDFSLTINNIESEDAAYYF |
| | | CLQHDNFPLTFGQGTKLEIK |
| 149362-nt | 150 | CAAGTGCAGCTTCAGGAAAGCGGACCGGGCCTGGTCAAGCCA |
| ScFv | | TCCGAAACTCTCTCCCTGACTTGCACTGTGTCTGGCGGTTCCA |
| domain | | TCTCATCGTCGTACTACTACTGGGGCTGGATTAGGCAGCCGCC |
| | | CGGAAAGGGACTGGAGTGGATCGGAAGCATCTACTATTCCGG |
| | | CTCGGCGTACTACAACCCTAGCCTCAAGTCGAGAGTGACCAT |
| | | CTCCGTGGATACCTCCAAGAACCAGTTTTCCCTGCGCCTGAGC |
| | | TCCGTGACCGCCGCTGACACCGCCGTGTACTACTGTGCTCGGC |
| | | ATTGGCAGGAATGGCCCGATGCCTTCGACATTTGGGGCCAGG |
| | | GCACTATGGTCACTGTGTCATCCGGGGGTGGAGGCAGCGGGG |
| | | GAGGAGGGTCCGGGGGGGGAGGTTCAGAGACAACCTTGACC |
| | | CAGTCACCCGCATTCATGTCCGCCACTCCGGGAGACAAGGTC |
| | | ATCATCTCGTGCAAAGCGTCCCAGGATATCGACGATGCCATG |
| | | AATTGGTACCAGCAGAAGCCTGGCGAAGCGCCGCTGTTCATT |
| | | ATCCAATCCGCAACCTCGCCCGTGCCTGGAATCCCACCGCGG |
| | | TTCAGCGGCAGCGGTTTCGGAACCGACTTTTCCCTGACCATTA |
| | | ACAACATTGAGTCCGAGGACGCCGCCTACTACTTCTGCCTGC |
| | | AACACGACAACTTCCCTCTCACGTTCGGCCAGGGAACCAAGC |
| | | TGGAAATCAAG |
| 149362-aa | 171 | QVQLQESGPGLVKPSETLSLTCTVSGGSISSSYYYWGWIRQPPGK |
| VH | | GLEWIGSIYYSGSAYYNPSLKSRVTISVDTSKNQFSLRLSSVTAA |
| | | DTAVYYCARHWQEWPDAFDIWGQGTMVTVSS |
| 149362-aa | 192 | ETTLTQSPAFMSATPGDKVIISCKASQDIDDAMNWYQQKPGEAP |
| VL | | LFIIQSATSPVPGIPPRFSGSGFGTDFSLTINNIESEDAAYYFCLQH |
| | | DNFPLTFGQGTKLEIK |
| 149362-aa | 213 | MALPVTALLLPLALLLHAARPQVQLQESGPGLVKPSETLSLTCT |
| Full CAR | | VSGGSISSSYYYWGWIRQPPGKGLEWIGSIYYSGSAYYNPSLKSR |
| | | VTISVDTSKNQFSLRLSSVTAADTAVYYCARHWQEWPDAFDIW |
| | | GQGTMVTVSSGGGGSGGGGSGGGGSETTLTQSPAFMSATPGDK |
| | | VIISCKASQDIDDAMNWYQQKPGEAPLFIIQSATSPVPGIPPRFSG |
| | | SGFGTDFSLTINNIESEDAAYYFCLQHDNFPLTFGQGTKLEIKTTT |
| | | PAPRPPTPAPTIASQPLSLRPEACRPAAGGAVHTRGLDFACDIYIW |
| | | APLAGTCGVLLLSLVITLYCKRGRKKLLYIFKQPFMRPVQTTQEE |
| | | DGCSCRFPEEEEGGCELRVKFSRSADAPAYKQGQNQLYNELNLG |
| | | RREEYDVLDKRRGRDPEMGGKPRRKNPQEGLYNELQKDKMAE |
| | | AYSEIGMKGERRRGKGHDGLYQGLSTATKDTYDALHMQALPPR |
| 149362-nt | 234 | ATGGCCCTCCCTGTCACCGCCCTGCTGCTTCCGCTGGCTCTTC |
| Full CAR | | TGCTCCACGCCGCTCGGCCCCAAGTGCAGCTTCAGGAAAGCG |
| | | GACCGGGCCTGGTCAAGCCATCCGAAACTCTCTCCCTGACTTG |
| | | CACTGTGTCTGGCGGTTCCATCTCATCGTCGTACTACTACTGG |
| | | GGCTGGATTAGGCAGCCGCCCGGAAAGGGACTGGAGTGGATC |
| | | GGAAGCATCTACTATTCCGGCTCGGCGTACTACAACCCTAGC |
| | | CTCAAGTCGAGAGTGACCATCTCCGTGGATACCTCCAAGAAC |
| | | CAGTTTTCCCTGCGCCTGAGCTCCGTGACCGCCGCTGACACCG |
| | | CCGTGTACTACTGTGCTCGGCATTGGCAGGAATGGCCCGATG |
| | | CCTTCGACATTTGGGGCCAGGGCACTATGGTCACTGTGTCATC |
| | | CGGGGGTGGAGGCAGCGGGGGAGGAGGGTCCGGGGGGGGAG |
| | | GTTCAGAGACAACCTTGACCCAGTCACCCGCATTCATGTCCGC |
| | | CACTCCGGGAGACAAGGTCATCATCTCGTGCAAAGCGTCCCA |
| | | GGATATCGACGATGCCATGAATTGGTACCAGCAGAAGCCTGG |
| | | CGAAGCGCCGCTGTTCATTATCCAATCCGCAACCTCGCCCGTG |
| | | CCTGGAATCCCACCGCGGTTCAGCGGCAGCGGTTTCGGAACC |
| | | GACTTTTCCCTGACCATTAACAACATTGAGTCCGAGGACGCC |
| | | GCCTACTACTTCTGCCTGCAACACGACAACTTCCCTCTCACGT |
| | | TCGGCCAGGGAACCAAGCTGGAAATCAAGACCACTACCCCAG |
| | | CACCGAGGCCACCCACCCCGGCTCCTACCATCGCCTCCCAGC |
| | | CTCTGTCCCTGCGTCCGGAGGCATGTAGACCCGCAGCTGGTG |
| | | GGGCCGTGCATACCCGGGGTCTTGACTTCGCCTGCGATATCTA |
| | | CATTTGGGCCCCTCTGGCTGGTACTTGCGGGGTCCTGCTGCTT |
| | | TCACTCGTGATCACTCTTTACTGTAAGCGCGGTCGGAAGAAG |
| | | CTGCTGTACATCTTTAAGCAACCCTTCATGAGGCCTGTGCAGA |
| | | CTACTCAAGAGGAGGACGGCTGTTCATGCCGGTTCCCAGAGG |
| | | AGGAGGAAGGCGGCTGCGAACTGCGCGTGAAATTCAGCCGC |
| | | AGCGCAGATGCTCCAGCCTACAAGCAGGGGCAGAACCAGCTC |
| | | TACAACGAACTCAATCTTGGTCGGAGAGAGGAGTACGACGTG |
| | | CTGGACAAGCGGAGAGGACGGGACCCAGAAATGGGCGGGAA |
| | | GCCGCGCAGAAAGAATCCCCAAGAGGGCCTGTACAACGAGCT |
| | | CCAAAAGGATAAGATGGCAGAAGCCTATAGCGAGATTGGTAT |
| | | GAAAGGGGAACGCAGAAGAGGCAAAGGCCACGACGGACTGT |
| | | ACCAGGGACTCAGCACCGCCACCAAGGACACCTATGACGCTC |
| | | TTCACATGCAGGCCCTGCCGCCTCGG |

149363

| | | |
|---|---|---|
| 149363-aa | 130 | VNLRESGPALVKPTQTLTLTCTFSGFSLRTSGMCVSWIRQPPGKA |
| ScFv | | LEWLARIDWDEDKFYSTSLKTRLTISKDTSDNQVVLRMTNMDP |
| domain | | ADTATYYCARSGAGGTSATAFDIWGPGTMVTVSSGGGGSGGGG |
| | | SGGGGSDIQMTQSPSSLSASVGDRVTITCRASQDIYNNLAWFQL |
| | | KPGSAPRSLMYAANKSQSGVPSRFSGSASGTDFTLTISSLQPEDF |
| | | ATYYCQHYYRFPYSFGQGTKLEIK |
| 149363-nt | 151 | CAAGTCAATCTGCGCGAATCCGGCCCCGCCTTGGTCAAGCCT |
| ScFv | | ACCCAGACCCTCACTCTGACCTGTACTTTCTCCGGCTTCTCCC |
| domain | | TGCGGACTTCCGGGATGTGCGTGTCCTGGATCAGACAGCCTC |
| | | CGGGAAAGGCCCTGGAGTGGCTCGCTCGCATTGACTGGGATG |
| | | AGGACAAGTTCTACTCCACCTCACTCAAGACCAGGCTGACCA |
| | | TCAGCAAAGATACCTCTGACAACCAAGTGGTGCTCCGCATGA |
| | | CCAACATGGACCCAGCCGACACTGCCACTTACTACTGCGCGA |
| | | GGAGCGGAGCGGGCGGAACCTCCGCCACCGCCTTCGATATTT |
| | | GGGGCCCGGGTACCATGGTCACCGTGTCAAGCGGAGGAGGG |
| | | GGGTCCGGGGGCGGCGGTTCCGGGGGAGGCGGATCGGACATT |
| | | CAGATGACTCAGTCACCATCGTCCCTGAGCGCTAGCGTGGGC |
| | | GACAGAGTGACAATCACTTGCCGGGCATCCCAGGACATCTAT |
| | | AACAACCTTGCGTGGTTCCAGCTGAAGCCTGGTTCCGCACCG |
| | | CGGTCACTTATGTACGCCGCCAACAAGAGCCAGTCGGGAGTG |
| | | CCGTCCCGGTTTTCCGGTTCGGCCTCGGGAACTGACTTCACCC |
| | | TGACGATCTCCAGCCTGCAACCCGAGGATTTCGCCACCTACTA |
| | | CTGCCAGCACTACTACCGCTTTCCCTACTCGTTCGGACAGGGA |
| | | ACCAAGCTGGAAATCAAG |
| 149363-aa | 172 | QVNLRESGPALVKPTQTLTLTCTFSGFSLRTSGMCVSWIRQPPGK |
| VH | | ALEWLARIDWDEDKFYSTSLKTRLTISKDTSDNQVVLRMTNMD |
| | | PADTATYYCARSGAGGTSATAFDIWGPGTMVTVSS |
| 149363-aa | 193 | DIQMTQSPSSLSASVGDRVTITCRASQDIYNNLAWFQLKPGSAPR |
| VL | | SLMYAANKSQSGVPSRFSGSASGTDFTLTISSLQPEDFATYYCQH |
| | | YYRFPYSFGQGTKLEIK |
| 149363-aa | 214 | MALPVTALLLPLALLLHAARPQVNLRESGPALVKPTQTLTLTCT |
| Full CAR | | FSGFSLRTSGMCVSWIRQPPGKALEWLARIDWDEDKFYSTSLKT |
| | | RLTISKDTSDNQVVLRMTNMDPADTATYYCARSGAGGTSATAF |
| | | DIWGPGTMVTVSSGGGGSGGGGSGGGGSDIQMTQSPSSLSASVG |
| | | DRVTITCRASQDIYNNLAWFQLKPGSAPRSLMYAANKSQSGVPS |
| | | RFSGSASGTDFTLTISSLQPEDFATYYCQHYYRFPYSFGQGTKLEI |
| | | KTTTPAPRPPTPAPTIASQPLSLRPEACRPAAGGAVHTRGLDFAC |
| | | DIYIWAPLAGTCGVLLLSLVITLYCKRGRKKLLYIFKQPFMRPVQ |
| | | TTQEEDGCSCRFPEEEEGGCELRVKFSRSADAPAYKQGQNQLYN |
| | | ELNLGRREEYDVLDKRRGRDPEMGGKPRRKNPQEGLYNELQKD |
| | | KMAEAYSEIGMKGERRRGKGHDGLYQGLSTATKDTYDALHMQ |
| | | ALPPR |
| 149363-nt | 235 | ATGGCCCTCCCTGTCACCGCCCTGCTGCTTCCGCTGGCTCTTC |
| Full CAR | | TGCTCCACGCCGCTCGGCCCCAAGTCAATCTGCGCGAATCCG |
| | | GCCCCGCCTTGGTCAAGCCTACCCAGACCCTCACTCTGACCTG |
| | | TACTTTCTCCGGCTTCTCCCTGCGGACTTCCGGGATGTGCGTG |
| | | TCCTGGATCAGACAGCCTCCGGGAAAGGCCCTGGAGTGGCTC |
| | | GCTCGCATTGACTGGGATGAGGACAAGTTCTACTCCACCTCA |
| | | CTCAAGACCAGGCTGACCATCAGCAAAGATACCTCTGACAAC |
| | | CAAGTGGTGCTCCGCATGACCAACATGGACCCAGCCGACACT |
| | | GCCACTTACTACTGCGCGAGGAGCGGAGCGGGCGGAACCTCC |
| | | GCCACCGCCTTCGATATTTGGGGCCCGGGTACCATGGTCACC |
| | | GTGTCAAGCGGAGGAGGGGGGTCCGGGGGCGGCGGTTCCGG |
| | | GGGAGGCGGATCGGACATTCAGATGACTCAGTCACCATCGTC |
| | | CCTGAGCGCTAGCGTGGGCGACAGAGTGACAATCACTTGCCG |
| | | GGCATCCCAGGACATCTATAACAACCTTGCGTGGTTCCAGCT |
| | | GAAGCCTGGTTCCGCACCGCGGTCACTTATGTACGCCGCCAA |
| | | CAAGAGCCAGTCGGGAGTGCCGTCCCGGTTTTCCGGTTCGGC |
| | | CTCGGGAACTGACTTCACCCTGACGATCTCCAGCCTGCAACCC |
| | | GAGGATTTCGCCACCTACTACTGCCAGCACTACTACCGCTTTC |
| | | CCTACTCGTTCGGACAGGGAACCAAGCTGGAAATCAAGACCA |
| | | CTACCCCAGCACCGAGGCCACCCACCCCGGCTCCTACCATCG |
| | | CCTCCCAGCCTCTGTCCCTGCGTCCGGAGGCATGTAGACCCGC |
| | | AGCTGGTGGGGCCGTGCATACCCGGGGTCTTGACTTCGCCTG |
| | | CGATATCTACATTTGGGCCCCTCTGGCTGGTACTTGCGGGGTC |
| | | CTGCTGCTTTCACTCGTGATCACTCTTTACTGTAAGCGCGGTC |
| | | GGAAGAAGCTGCTGTACATCTTTAAGCAACCCTTCATGAGGC |
| | | CTGTGCAGACTACTCAAGAGGAGGACGGCTGTTCATGCCGGT |
| | | TCCCAGAGGAGGAGGAAGGCGGCTGCGAACTGCGCGTGAAA |
| | | TTCAGCCGCAGCGCAGATGCTCCAGCCTACAAGCAGGGGCAG |
| | | AACCAGCTCTACAACGAACTCAATCTTGGTCGGAGAGAGGAG |
| | | TACGACGTGCTGGACAAGCGGAGAGGACGGGACCCAGAAAT |
| | | GGGCGGGAAGCCGCGCAGAAAGAATCCCCAAGAGGGCCTGT |
| | | ACAACGAGCTCCAAAAGGATAAGATGGCAGAAGCCTATAGC |
| | | GAGATTGGTATGAAAGGGGAACGCAGAAGAGGCAAAGGCCA |
| | | CGACGGACTGTACCAGGGACTCAGCACCGCCACCAAGGACAC |
| | | CTATGACGCTCTTCACATGCAGGCCCTGCCGCCTCGG |

149364

| | | |
|---|---|---|
| 149364-aa | 131 | EVQLVESGGGLVKPGGSLRLSCAASGFTFSSYSMNWVRQAPGK |
| ScFv | | GLEWVSSISSSSSYIYYADSVKGRFTISRDNAKNSLYLQMNSLRA |
| domain | | EDTAVYYCAKTIAAVYAFDIWGQGTTVTVSSGGGGSGGGGSGG |
| | | GGSEIVLTQSPLSLPVTPEEPASISCRSSQSLLHSNGYNYLDWYLQ |
| | | KPGQSPQLLIYLGSNRASGVPDRFSGSGSGTDFTLKISRVEAEDV |
| | | GVYYCMQALQTPYTFGQGTKLEIK |
| 149364-nt | 152 | GAAGTGCAGCTTGTCGAATCCGGGGGGGGACTGGTCAAGCCG |
| ScFv | | GGCGGATCACTGAGACTGTCCTGCGCCGCGAGCGGCTTCACG |
| domain | | TTCTCCTCCTACTCCATGAACTGGGTCCGCCAAGCCCCCGGGA |
| | | AGGGACTGGAATGGGTGTCCTCTATCTCCTCGTCGTCGTCCTA |
| | | CATCTACTACGCCGACTCCGTGAAGGGAAGATTCACCATTTCC |
| | | CGCGACAACGCAAAGAACTCACTGTACTTGCAAATGAACTCA |
| | | CTCCGGGCCGAAGATACTGCTGTGTACTATTGCGCCAAGACT |
| | | ATTGCCGCCGTCTACGCTTTCGACATCTGGGGCCAGGGAACC |
| | | ACCGTGACTGTGTCGTCCGGTGGTGGTGGCTCGGGCGGAGGA |
| | | GGAAGCGGCGGCGGGGGGTCCGAGATTGTGCTGACCCAGTCG |
| | | CCACTGAGCCTCCCTGTGACCCCCGAGGAACCCGCCAGCATC |
| | | AGCTGCCGGTCCAGCCAGTCCCTGCTCCACTCCAACGGATAC |
| | | AATTACCTCGATTGGTACCTTCAGAAGCCTGGACAAAGCCCG |
| | | CAGCTGCTCATCTACTTGGGATCAAACCGCGCGTCAGGAGTG |
| | | CCTGACCGGTTCTCCGGCTCGGGCAGCGGTACCGATTTCACCC |
| | | TGAAAATCTCCAGGGTGGAGGCAGAGGACGTGGGAGTGTATT |
| | | ACTGTATGCAGGCGCTGCAGACTCCGTACACATTTGGGCAGG |
| | | GCACCAAGCTGGAGATCAAG |
| 149364-aa | 173 | EVQLVESGGGLVKPGGSLRLSCAASGFTFSSYSMNWVRQAPGK |
| VH | | GLEWVSSISSSSSYIYYADSVKGRFTISRDNAKNSLYLQMNSLRA |
| | | EDTAVYYCAKTIAAVYAFDIWGQGTTVTVSS |
| 149364-aa | 194 | EIVLTQSPLSLPVTPEEPASISCRSSQSLLHSNGYNYLDWYLQKPG |
| VL | | QSPQLLIYLGSNRASGVPDRFSGSGSGTDFTLKISRVEAEDVGVY |
| | | YCMQALQTPYTFGQGTKLEIK |
| 149364-aa | 215 | MALPVTALLLPLALLLHAARPEVQLVESGGGLVKPGGSLRLSCA |
| Full CAR | | ASGFTFSSYSMNWVRQAPGKGLEWVSSISSSSSYIYYADSVKGR |
| | | FTISRDNAKNSLYLQMNSLRAEDTAVYYCAKTIAAVYAFDIWG |
| | | QGTTVTVSSGGGGSGGGGSGGGGSEIVLTQSPLSLPVTPEEPASIS |
| | | CRSSQSLLHSNGYNYLDWYLQKPGQSPQLLIYLGSNRASGVPDR |
| | | FSGSGSGTDFTLKISRVEAEDVGVYYCMQALQTPYTFGQGTKLE |
| | | IKTTTPAPRPPTPAPTIASQPLSLRPEACRPAAGGAVHTRGLDFAC |
| | | DIYIWAPLAGTCGVLLLSLVITLYCKRGRKKLLYIFKQPFMRPVQ |
| | | TTQEEDGCSCRFPEEEEGGCELRVKFSRSADAPAYKQGQNQLYN |
| | | ELNLGRREEYDVLDKRRGRDPEMGGKPRRKNPQEGLYNELQKD |
| | | KMAEAYSEIGMKGERRRGKGHDGLYQGLSTATKDTYDALHMQ |
| | | ALPPR |
| 149364-nt 236 | | ATGGCCCTCCCTGTCACCGCCCTGCTGCTTCCGCTGGCTCTTC |
| Full CAR | | TGCTCCACGCCGCTCGGCCCGAAGTGCAGCTTGTCGAATCCG |
| | | GGGGGGGACTGGTCAAGCCGGGCGGATCACTGAGACTGTCCT |
| | | GCGCCGCGAGCGGCTTCACGTTCTCCTCCTACTCCATGAACTG |
| | | GGTCCGCCAAGCCCCCGGGAAGGGACTGGAATGGGTGTCCTC |
| | | TATCTCCTCGTCGTCGTCCTACATCTACTACGCCGACTCCGTG |
| | | AAGGGAAGATTCACCATTTCCCGCGACAACGCAAAGAACTCA |
| | | CTGTACTTGCAAATGAACTCACTCCGGGCCGAAGATACTGCT |
| | | GTGTACTATTGCGCCAAGACTATTGCCGCCGTCTACGCTTTCG |
| | | ACATCTGGGGCCAGGGAACCACCGTGACTGTGTCGTCCGGTG |
| | | GTGGTGGCTCGGGCGGAGGAGGAAGCGGCGGCGGGGGGTCC |
| | | GAGATTGTGCTGACCCAGTCGCCACTGAGCCTCCCTGTGACCC |
| | | CCGAGGAACCCGCCAGCATCAGCTGCCGGTCCAGCCAGTCCC |
| | | TGCTCCACTCCAACGGATACAATTACCTCGATTGGTACCTTCA |
| | | GAAGCCTGGACAAAGCCCGCAGCTGCTCATCTACTTGGGATC |
| | | AAACCGCGCGTCAGGAGTGCCTGACCGGTTCTCCGGCTCGGG |
| | | CAGCGGTACCGATTTCACCCTGAAAATCTCCAGGGTGGAGGC |
| | | AGAGGACGTGGGAGTGTATTACTGTATGCAGGCGCTGCAGAC |
| | | TCCGTACACATTTGGGCAGGGCACCAAGCTGGAGATCAAGAC |
| | | CACTACCCCAGCACCGAGGCCACCCACCCCGGCTCCTACCAT |
| | | CGCCTCCCAGCCTCTGTCCCTGCGTCCGGAGGCATGTAGACCC |
| | | GCAGCTGGTGGGGCCGTGCATACCCGGGGTCTTGACTTCGCC |
| | | TGCGATATCTACATTTGGGCCCCTCTGGCTGGTACTTGCGGGG |
| | | TCCTGCTGCTTTCACTCGTGATCACTCTTTACTGTAAGCGCGG |
| | | TCGGAAGAAGCTGCTGTACATCTTTAAGCAACCCTTCATGAG |
| | | GCCTGTGCAGACTACTCAAGAGGAGGACGGCTGTTCATGCCG |
| | | GTTCCCAGAGGAGGAGGAAGGCGGCTGCGAACTGCGCGTGA |
| | | AATTCAGCCGCAGCGCAGATGCTCCAGCCTACAAGCAGGGGC |
| | | AGAACCAGCTCTACAACGAACTCAATCTTGGTCGGAGAGAGG |
| | | AGTACGACGTGCTGGACAAGCGGAGAGGACGGGACCCAGAA |
| | | ATGGGCGGGAAGCCGCGCAGAAAGAATCCCCAAGAGGGCCT |
| | | GTACAACGAGCTCCAAAAGGATAAGATGGCAGAAGCCTATA |
| | | GCGAGATTGGTATGAAAGGGGAACGCAGAAGAGGCAAAGGC |
| | | CACGACGGACTGTACCAGGGACTCAGCACCGCCACCAAGGAC |
| | | ACCTATGACGCTCTTCACATGCAGGCCCTGCCGCCTCGG |

149365

| | | |
|---|---|---|
| 149365-aa | 132 | EVQLVESGGGLVKPGGSLRLSCAASGFTFSDYYMSWIRQAPGKG |
| ScFv | | LEWVSYISSSGSTIYYADSVKGRFTISRDNAKNSLYLQMNSLRAE |
| domain | | DTAVYYCARDLRGAFDIWGQGTMVTVSSGGGGSGGGGSGGGG |
| | | SSYVLTQSPSVSAAPGYTATISCGGNNIGTKSVHWYQQKPGQAP |
| | | LLVIRDDSVRPSK1PGRFSGSNSGNMATLTISGVQAGDEADFYCQ |
| | | VWDSDSEHVVFGGGTKLTVL |
| 149365-nt | 153 | GAAGTCCAGCTCGTGGAGTCCGGCGGAGGCCTTGTGAAGCCT |
| ScFv | | GGAGGTTCGCTGAGACTGTCCTGCGCCGCCTCCGGCTTCACCT |
| domain | | TCTCCGACTACTACATGTCCTGGATCAGACAGGCCCCGGGAA |
| | | AGGGCCTGGAATGGGTGTCCTACATCTCGTCATCGGGCAGCA |
| | | CTATCTACTACGCGGACTCAGTGAAGGGGCGGTTCACCATTTC |
| | | CCGGGATAACGCGAAGAACTCGCTGTATCTGCAAATGAACTC |
| | | ACTGAGGGCCGAGGACACCGCCGTGTACTACTGCGCCCGCGA |
| | | TCTCCGCGGGGCATTTGACATCTGGGGACAGGGAACCATGGT |
| | | CACAGTGTCCAGCGGAGGGGGAGGATCGGGTGGCGGAGGTT |
| | | CCGGGGGTGGAGGCTCCTCCTACGTGCTGACTCAGAGCCCAA |
| | | GCGTCAGCGCTGCGCCCGGTTACACGGCAACCATCTCCTGTG |
| | | GCGGAAACAACATTGGGACCAAGTCTGTGCACTGGTATCAGC |
| | | AGAAGCCGGGCCAAGCTCCCCTGTTGGTGATCCGCGATGACT |
| | | CCGTGCGGCCTAGCAAAATTCCGGGACGGTTCTCCGGCTCCA |
| | | ACAGCGGCAATATGGCCACTCTCACCATCTCGGGAGTGCAGG |
| | | CCGGAGATGAAGCCGACTTCTACTGCCAAGTCTGGGACTCAG |
| | | ACTCCGAGCATGTGGTGTTCGGGGGCGGAACCAAGCTGACTG |
| | | TGCTC |
| 149365-aa | 174 | EVQLVESGGGLVKPGGSLRLSCAASGFTFSDYYMSWIRQAPGKG |
| VH | | LEWVSYISSSGSTIYYADSVKGRFTISRDNAKNSLYLQMNSLRAE |
| | | DTAVYYCARDLRGAFDIWGQGTMVTVSS |
| 149365-aa | 195 | SYVLTQSPSVSAAPGYTATISCGGNNIGTKSVHWYQQKPGQAPL |
| VL | | LVIRDDSVRPSKIPGRFSGSNSGNMATLTISGVQAGDEADFYCQV |
| | | WDSDSEHVVFGGGTKLTVL |
| 149365-aa | 216 | MALPVTALLLPLALLLHAARPEVQLVESGGGLVKPGGSLRLSCA |
| Full CAR | | ASGFTFSDYYMSWIRQAPGKGLEWVSYISSSGSTIYYADSVKGR |
| | | FTISRDNAKNSLYLQMNSLRAEDTAVYYCARDLRGAFDIWGQG |
| | | TMVTVSSGGGGSGGGGSGGGGSSYVLTQSPSVSAAPGYTATISC |
| | | GGNNIGTKSVHWYQQKPGQAPLLVIRDDSVRPSKIPGRFSGSNS |
| | | GNMATLTISGVQAGDEADFYCQVWDSDSEHVVFGGGTKLTVLT |
| | | TTPAPRPPTPAPTIASQPLSLRPEACRPAAGGAVHTRGLDFACDIY |
| | | IWAPLAGTCGVLLLSLVITLYCKRGRKKLLYIFKQPFMRPVQTTQ |
| | | EEDGCSCRFPEEEEGGCELRVKFSRSADAPAYKQGQNQLYNELN |
| | | LGRREEYDVLDKRRGRDPEMGGKPRRKNPQEGLYNELQKDKM |
| | | AEAYSEIGMKGERRRGKGHDGLYQGLSTATKDTYDALHMQAL |
| | | PPR |
| 149365-nt | 237 | ATGGCCCTCCCTGTCACCGCCCTGCTGCTTCCGCTGGCTCTTC |
| Full CAR | | TGCTCCACGCCGCTCGGCCCGAAGTCCAGCTCGTGGAGTCCG |
| | | GCGGAGGCCTTGTGAAGCCTGGAGGTTCGCTGAGACTGTCCT |
| | | GCGCCGCCTCCGGCTTCACCTTCTCCGACTACTACATGTCCTG |
| | | GATCAGACAGGCCCCGGGAAAGGGCCTGGAATGGGTGTCCTA |
| | | CATCTCGTCATCGGGCAGCACTATCTACTACGCGGACTCAGTG |
| | | AAGGGGCGGTTCACCATTTCCCGGGATAACGCGAAGAACTCG |
| | | CTGTATCTGCAAATGAACTCACTGAGGGCCGAGGACACCGCC |
| | | GTGTACTACTGCGCCCGCGATCTCCGCGGGGCATTTGACATCT |
| | | GGGGACAGGGAACCATGGTCACAGTGTCCAGCGGAGGGGGA |
| | | GGATCGGGTGGCGGAGGTTCCGGGGGTGGAGGCTCCTCCTAC |
| | | GTGCTGACTCAGAGCCCAAGCGTCAGCGCTGCGCCCGGTTAC |
| | | ACGGCAACCATCTCCTGTGGCGGAAACAACATTGGGACCAAG |
| | | TCTGTGCACTGGTATCAGCAGAAGCCGGGCCAAGCTCCCCTG |
| | | TTGGTGATCCGCGATGACTCCGTGCGGCCTAGCAAAATTCCG |
| | | GGACGGTTCTCCGGCTCCAACAGCGGCAATATGGCCACTCTC |
| | | ACCATCTCGGGAGTGCAGGCCGGAGATGAAGCCGACTTCTAC |
| | | TGCCAAGTCTGGGACTCAGACTCCGAGCATGTGGTGTTCGGG |
| | | GGCGGAACCAAGCTGACTGTGCTCACCACTACCCCAGCACCG |
| | | AGGCCACCCACCCCGGCTCCTACCATCGCCTCCCAGCCTCTGT |
| | | CCCTGCGTCCGGAGGCATGTAGACCCGCAGCTGGTGGGGCCG |
| | | TGCATACCCGGGGTCTTGACTTCGCCTGCGATATCTACATTTG |
| | | GGCCCCTCTGGCTGGTACTTGCGGGGTCCTGCTGCTTTCACTC |
| | | GTGATCACTCTTTACTGTAAGCGCGGTCGGAAGAAGCTGCTG |
| | | TACATCTTTAAGCAACCCTTCATGAGGCCTGTGCAGACTACTC |
| | | AAGAGGAGGACGGCTGTTCATGCCGGTTCCCAGAGGAGGAG |
| | | GAAGGCGGCTGCGAACTGCGCGTGAAATTCAGCCGCAGCGCA |
| | | GATGCTCCAGCCTACAAGCAGGGGCAGAACCAGCTCTACAAC |
| | | GAACTCAATCTTGGTCGGAGAGAGGAGTACGACGTGCTGGAC |
| | | AAGCGGAGAGGACGGGACCCAGAAATGGGCGGGAAGCCGCG |
| | | CAGAAAGAATCCCCAAGAGGGCCTGTACAACGAGCTCCAAA |
| | | AGGATAAGATGGCAGAAGCCTATAGCGAGATTGGTATGAAA |
| | | GGGGAACGCAGAAGAGGCAAAGGCCACGACGGACTGTACCA |
| | | GGGACTCAGCACCGCCACCAAGGACACCTATGACGCTCTTCA |
| | | CATGCAGGCCCTGCCGCCTCGG |

149366

| | | |
|---|---|---|
| 149366-aa | 133 | QVQLVQSGAEVKKPGASVKVSCKPSGYTVTSHYIHWVRRAPGQ |
| ScFv | | GLEWMGMINPSGGVTAYSQTLQGRVTMTSDTSSSTVYMELSSL |
| domain | | RSEDTAMYYCAREGSGSGWYFDFWGRGTLVTVSSGGGGSGGG |
| | | GSGGGGSSYVLTQPPSVSVSPGQTASITCSGDGLSKKYVSWYQQ |
| | | KAGQSPVVLISRDKERPSGIPDRFSGSNSADTATLTISGTQAMDE |
| | | ADYYCQAWDDTTVVFGGGTKLTVL |
| 149366-nt | 154 | CAAGTGCAGCTGGTGCAGAGCGGGGCCGAAGTCAAGAAGCC |
| ScFv | | GGGAGCCTCCGTGAAAGTGTCCTGCAAGCCTTCGGGATACAC |
| domain | | CGTGACCTCCCACTACATTCATTGGGTCCGCCGCGCCCCCGGC |
| | | CAAGGACTCGAGTGGATGGGCATGATCAACCCTAGCGGCGGA |
| | | GTGACCGCGTACAGCCAGACGCTGCAGGGACGCGTGACTATG |
| | | ACCTCGGATACCTCCTCCTCCACCGTCTATATGGAACTGTCCA |
| | | GCCTGCGGTCCGAGGATACCGCCATGTACTACTGCGCCCGGG |
| | | AAGGATCAGGCTCCGGGTGGTATTTCGACTTCTGGGGAAGAG |
| | | GCACCCTCGTGACTGTGTCATCTGGGGGAGGGGGTTCCGGTG |
| | | GTGGCGGATCGGGAGGAGGCGGTTCATCCTACGTGCTGACCC |
| | | AGCCACCCTCCGTGTCCGTGAGCCCCGGCCAGACTGCATCGA |
| | | TTACATGTAGCGGCGACGGCCTCTCCAAGAAATACGTGTCGT |
| | | GGTACCAGCAGAAGGCCGGACAGAGCCCGGTGGTGCTGATCT |
| | | CAAGAGATAAGGAGCGGCCTAGCGGAATCCCGGACAGGTTCT |
| | | CGGGTTCCAACTCCGCGGACACTGCTACTCTGACCATCTCGGG |
| | | GACCCAGGCTATGGACGAAGCCGATTACTACTGCCAAGCCTG |
| | | GGACGACACTACTGTCGTGTTTGGAGGGGGCACCAAGTTGAC |
| | | CGTCCTT |
| 149366-aa | 175 | QVQLVQSGAEVKKPGASVKVSCKPSGYTVTSHYIHWVRRAPGQ |
| VH | | GLEWMGMINPSGGVTAYSQTLQGRVTMTSDTSSSTVYMELSSL |
| | | RSEDTAMYYCAREGSGSGWYFDFWGRGTLVTVSS |
| 149366-aa | 196 | SYVLTQPPSVSVSPGQTASITCSGDGLSKKYVSWYQQKAGQSPV |
| VL | | VLISRDKERPSGIPDRFSGSNSADTATLTISGTQAMDEADYYCQA |
| | | WDDTTVVFGGGTKLTVL |
| 149366-aa | 217 | MALPVTALLLPLALLLHAARPQVQLVQSGAEVKKPGASVKVSC |
| Full CAR | | KPSGYTVTSHYIHWVRRAPGQGLEWMGMINPSGGVTAYSQTLQ |
| | | GRVTMTSDTSSSTVYMELSSLRSEDTAMYYCAREGSGSGWYFD |
| | | FWGRGTLVTVSSGGGGSGGGGSGGGGSSYVLTQPPSVSVSPGQT |
| | | ASITCSGDGLSKKYVSWYQQKAGQSPVVLISRDKERPSGIPDRFS |
| | | GSNSADTATLTISGTQAMDEADYYCQAWDDTTVVFGGGTKLTV |
| | | LTTTPAPRPPTPAPTIASQPLSLRPEACRPAAGGAVHTRGLDFAC |
| | | DIYIWAPLAGTCGVLLLSLVITLYCKRGRKKLLYIFKQPFMRPVQ |
| | | TTQEEDGCSCRFPEEEEGGCELRVKFSRSADAPAYKQGQNQLYN |
| | | ELNLGRREEYDVLDKRRGRDPEMGGKPRRKNPQEGLYNELQKD |
| | | KMAEAYSEIGMKGERRRGKGHDGLYQGLSTATKDTYDALHMQ |
| | | ALPPR |
| 149366-nt | 238 | ATGGCCCTCCCTGTCACCGCCCTGCTGCTTCCGCTGGCTCTTC |
| Full CAR | | TGCTCCACGCCGCTCGGCCCCAAGTGCAGCTGGTGCAGAGCG |
| | | GGGCCGAAGTCAAGAAGCCGGGAGCCTCCGTGAAAGTGTCCT |
| | | GCAAGCCTTCGGGATACACCGTGACCTCCCACTACATTCATTG |
| | | GGTCCGCCGCGCCCCCGGCCAAGGACTCGAGTGGATGGGCAT |
| | | GATCAACCCTAGCGGCGGAGTGACCGCGTACAGCCAGACGCT |
| | | GCAGGGACGCGTGACTATGACCTCGGATACCTCCTCCTCCAC |
| | | CGTCTATATGGAACTGTCCAGCCTGCGGTCCGAGGATACCGC |
| | | CATGTACTACTGCGCCCGGGAAGGATCAGGCTCCGGGTGGTA |
| | | TTTCGACTTCTGGGGAAGAGGCACCCTCGTGACTGTGTCATCT |
| | | GGGGGAGGGGGTTCCGGTGGTGGCGGATCGGGAGGAGGCGG |
| | | TTCATCCTACGTGCTGACCCAGCCACCCTCCGTGTCCGTGAGC |
| | | CCCGGCCAGACTGCATCGATTACATGTAGCGGCGACGGCCTC |
| | | TCCAAGAAATACGTGTCGTGGTACCAGCAGAAGGCCGGACAG |
| | | AGCCCGGTGGTGCTGATCTCAAGAGATAAGGAGCGGCCTAGC |
| | | GGAATCCCGGACAGGTTCTCGGGTTCCAACTCCGCGGACACT |
| | | GCTACTCTGACCATCTCGGGGACCCAGGCTATGGACGAAGCC |
| | | GATTACTACTGCCAAGCCTGGGACGACACTACTGTCGTGTTTG |
| | | GAGGGGGCACCAAGTTGACCGTCCTTACCACTACCCCAGCAC |
| | | CGAGGCCACCCACCCCGGCTCCTACCATCGCCTCCCAGCCTCT |
| | | GTCCCTGCGTCCGGAGGCATGTAGACCCGCAGCTGGTGGGGC |
| | | CGTGCATACCCGGGGTCTTGACTTCGCCTGCGATATCTACATT |
| | | TGGGCCCCTCTGGCTGGTACTTGCGGGGTCCTGCTGCTTTCAC |
| | | TCGTGATCACTCTTTACTGTAAGCGCGGTCGGAAGAAGCTGCT |
| | | GTACATCTTTAAGCAACCCTTCATGAGGCCTGTGCAGACTACT |
| | | CAAGAGGAGGACGGCTGTTCATGCCGGTTCCCAGAGGAGGAG |
| | | GAAGGCGGCTGCGAACTGCGCGTGAAATTCAGCCGCAGCGCA |
| | | GATGCTCCAGCCTACAAGCAGGGGCAGAACCAGCTCTACAAC |
| | | GAACTCAATCTTGGTCGGAGAGAGGAGTACGACGTGCTGGAC |
| | | AAGCGGAGAGGACGGGACCCAGAAATGGGCGGGAAGCCGCG |
| | | CAGAAAGAATCCCCAAGAGGGCCTGTACAACGAGCTCCAAA |
| | | AGGATAAGATGGCAGAAGCCTATAGCGAGATTGGTATGAAA |
| | | GGGGAACGCAGAAGAGGCAAAGGCCACGACGGACTGTACCA |
| | | GGGACTCAGCACCGCCACCAAGGACACCTATGACGCTCTTCA |
| | | CATGCAGGCCCTGCCGCCTCGG |

149367

| | | |
|---|---|---|
| 149367-aa | 134 | QVQLQESGPGLVKPSQTLSLTCTVSGGSISSGGYYWSWIRQHPG |
| ScFv | | KGLEWIGYIYYSGSTYYNPSLKSRVTISVDTSKNQFSLKLSSVTA |
| domain | | ADTAVYYCARAGIAARLRGAFDIWGQGTMVTVSSGGGGSGGG |
| | | GSGGGGSDIVMTQSPSSVSASVGDRVIITCRASQGIRNWLAWYQ |
| | | QKPGKAPNLLIYAASNLQSGVPSRFSGSGSGADFTLTISSLQPEDV |
| | | ATYYCQKYNSAPFTFGPGTKVDIK |
| 149367-nt | 155 | CAAGTGCAGCTTCAGGAGAGCGGCCCGGGACTCGTGAAGCCG |
| ScFv | | TCCCAGACCCTGTCCCTGACTTGCACCGTGTCGGGAGGAAGC |
| domain | | ATCTCGAGCGGAGGCTACTATTGGTCGTGGATTCGGCAGCAC |
| | | CCTGGAAAGGGCCTGGAATGGATCGGCTACATCTACTACTCC |
| | | GGCTCGACCTACTACAACCCATCGCTGAAGTCCAGAGTGACA |
| | | ATCTCAGTGGACACGTCCAAGAATCAGTTCAGCCTGAAGCTC |
| | | TCTTCCGTGACTGCGGCCGACACCGCCGTGTACTACTGCGCAC |
| | | GCGCTGGAATTGCCGCCCGGCTGAGGGGTGCCTTCGACATTT |
| | | GGGGACAGGGCACCATGGTCACCGTGTCCTCCGGCGGCGGAG |
| | | GTTCCGGGGGTGGAGGCTCAGGAGGAGGGGGGTCCGACATC |
| | | GTCATGACTCAGTCGCCCTCAAGCGTCAGCGCGTCCGTCGGG |
| | | GACAGAGTGATCATCACCTGTCGGGCGTCCCAGGGAATTCGC |
| | | AACTGGCTGGCCTGGTATCAGCAGAAGCCCGGAAAGGCCCCC |
| | | AACCTGTTGATCTACGCCGCCTCAAACCTCCAATCCGGGGTGC |
| | | CGAGCCGCTTCAGCGGCTCCGGTTCGGGTGCCGATTTCACTCT |
| | | GACCATCTCCTCCCTGCAACCTGAAGATGTGGCTACCTACTAC |
| | | TGCCAAAAGTACAACTCCGCACCTTTTACTTTCGGACCGGGG |
| | | ACCAAAGTGGACATTAAG |
| 149367-aa | 176 | QVQLQESGPGLVKPSQTLSLTCTVSGGSISSGGYYWSWIRQHPG |
| VH | | KGLEWIGYIYYSGSTYYNPSLKSRVTISVDTSKNQFSLKLSSVTA |
| | | ADTAVYYCARAGIAARLRGAFDIWGQGTMVTVSS |
| 149367-aa | 197 | DIVMTQSPSSVSASVGDRVIITCRASQGIRNWLAWYQQKPGKAP |
| VL | | NLLIYAASNLQSGVPSRFSGSGSGADFTLTISSLQPEDVATYYCQ |
| | | KYNSAPFTFGPGTKVDIK |
| 149367-aa | 218 | MALPVTALLLPLALLLHAARPQVQLQESGPGLVKPSQTLSLTCT |
| Full CAR | | VSGGSISSGGYYWSWIRQHPGKGLEWIGYIYYSGSTYYNPSLKS |
| | | RVTISVDTSKNQFSLKLSSVTAADTAVYYCARAGIAARLRGAFDI |
| | | WGQGTMVTVSSGGGGSGGGGSGGGGSDIVMTQSPSSVSASVGD |
| | | RVIITCRASQGIRNWLAWYQQKPGKAPNLLIYAASNLQSGVPSR |
| | | FSGSGSGADFTLTISSLQPEDVATYYCQKYNSAPFTFGPGTKVDI |
| | | KTTTPAPRPPTPAPTIASQPLSLRPEACRPAAGGAVHTRGLDFAC |
| | | DIYIWAPLAGTCGVLLLSLVITLYCKRGRKKLLYIFKQPFMRPVQ |
| | | TTQEEDGCSCRFPEEEEGGCELRVKFSRSADAPAYKQGQNQLYN |
| | | ELNLGRREEYDVLDKRRGRDPEMGGKPRRKNPQEGLYNELQKD |
| | | KMAEAYSEIGMKGERRRGKGHDGLYQGLSTATKDTYDALHMQ |
| | | ALPPR |
| 149367-nt | 239 | ATGGCCCTCCCTGTCACCGCCCTGCTGCTTCCGCTGGCTCTTC |
| Full CAR | | TGCTCCACGCCGCTCGGCCCCAAGTGCAGCTTCAGGAGAGCG |
| | | GCCCGGGACTCGTGAAGCCGTCCCAGACCCTGTCCCTGACTT |
| | | GCACCGTGTCGGGAGGAAGCATCTCGAGCGGAGGCTACTATT |
| | | GGTCGTGGATTCGGCAGCACCCTGGAAAGGGCCTGGAATGGA |
| | | TCGGCTACATCTACTACTCCGGCTCGACCTACTACAACCCATC |
| | | GCTGAAGTCCAGAGTGACAATCTCAGTGGACACGTCCAAGAA |
| | | TCAGTTCAGCCTGAAGCTCTCTTCCGTGACTGCGGCCGACACC |
| | | GCCGTGTACTACTGCGCACGCGCTGGAATTGCCGCCCGGCTG |
| | | AGGGGTGCCTTCGACATTTGGGGACAGGGCACCATGGTCACC |
| | | GTGTCCTCCGGCGGCGGAGGTTCCGGGGGTGGAGGCTCAGGA |
| | | GGAGGGGGGTCCGACATCGTCATGACTCAGTCGCCCTCAAGC |
| | | GTCAGCGCGTCCGTCGGGGACAGAGTGATCATCACCTGTCGG |
| | | GCGTCCCAGGGAATTCGCAACTGGCTGGCCTGGTATCAGCAG |
| | | AAGCCCGGAAAGGCCCCCAACCTGTTGATCTACGCCGCCTCA |
| | | AACCTCCAATCCGGGGTGCCGAGCCGCTTCAGCGGCTCCGGT |
| | | TCGGGTGCCGATTTCACTCTGACCATCTCCTCCCTGCAACCTG |
| | | AAGATGTGGCTACCTACTACTGCCAAAAGTACAACTCCGCAC |
| | | CTTTTACTTTCGGACCGGGGACCAAAGTGGACATTAAGACCA |
| | | CTACCCCAGCACCGAGGCCACCCACCCCGGCTCCTACCATCG |
| | | CCTCCCAGCCTCTGTCCCTGCGTCCGGAGGCATGTAGACCCGC |
| | | AGCTGGTGGGGCCGTGCATACCCGGGGTCTTGACTTCGCCTG |
| | | CGATATCTACATTTGGGCCCCTCTGGCTGGTACTTGCGGGGTC |
| | | CTGCTGCTTTCACTCGTGATCACTCTTTACTGTAAGCGCGGTC |
| | | GGAAGAAGCTGCTGTACATCTTTAAGCAACCCTTCATGAGGC |
| | | CTGTGCAGACTACTCAAGAGGAGGACGGCTGTTCATGCCGGT |
| | | TCCCAGAGGAGGAGGAAGGCGGCTGCGAACTGCGCGTGAAA |
| | | TTCAGCCGCAGCGCAGATGCTCCAGCCTACAAGCAGGGGCAG |
| | | AACCAGCTCTACAACGAACTCAATCTTGGTCGGAGAGAGGAG |
| | | TACGACGTGCTGGACAAGCGGAGAGGACGGGACCCAGAAAT |
| | | GGGCGGGAAGCCGCGCAGAAAGAATCCCCAAGAGGGCCTGT |
| | | ACAACGAGCTCCAAAAGGATAAGATGGCAGAAGCCTATAGC |
| | | GAGATTGGTATGAAAGGGGAACGCAGAAGAGGCAAAGGCCA |
| | | CGACGGACTGTACCAGGGACTCAGCACCGCCACCAAGGACAC |
| | | CTATGACGCTCTTCACATGCAGGCCCTGCCGCCTCGG |

149368

| | | |
|---|---|---|
| 149368-aa | 135 | QVQLVQSGAEVKKPGSSVKVSCKASGGTFSSYAISWVRQAPGQ |
| ScFv | | GLEWMGGIIPIFGTANYAQKFQGRVTITADESTSTAYMELSSLRS |
| domain | | EDTAVYYCARRGGYQLLRWDVGLLRSAFDIWGQGTMVTVSSG |
| | | GGGSGGGGSGGGGSSYVLTQPPSVSVAPGQTARITCGGNNIGSK |
| | | SVHWYQQKPGQAPVLVLYGKNNRPSGVPDRFSGSRSGTTASLTI |
| | | TGAQAEDEADYYCSSRDSSGDHLRVFGTGTKVTVL |
| 149368-nt | 156 | CAAGTGCAGCTGGTCCAGTCGGGCGCCGAGGTCAAGAAGCCC |
| ScFv | | GGGAGCTCTGTGAAAGTGTCCTGCAAGGCCTCCGGGGGCACC |
| domain | | TTTAGCTCCTACGCCATCTCCTGGGTCCGCCAAGCACCGGGTC |
| | | AAGGCCTGGAGTGGATGGGGGGAATTATCCCTATCTTCGGCA |
| | | CTGCCAACTACGCCCAGAAGTTCCAGGGACGCGTGACCATTA |
| | | CCGCGGACGAATCCACCTCCACCGCTTATATGGAGCTGTCCA |
| | | GCTTGCGCTCGGAAGATACCGCCGTGTACTACTGCGCCCGGA |
| | | GGGGTGGATACCAGCTGCTGAGATGGGACGTGGGCCTCCTGC |
| | | GGTCGGCGTTCGACATCTGGGGCCAGGGCACTATGGTCACTG |
| | | TGTCCAGCGGAGGAGGCGGATCGGGAGGCGGCGGATCAGGG |
| | | GGAGGCGGTTCCAGCTACGTGCTTACTCAACCCCCTTCGGTGT |
| | | CCGTGGCCCCGGGACAGACCGCCAGAATCACTTGCGGAGGAA |
| | | ACAACATTGGGTCCAAGAGCGTGCATTGGTACCAGCAGAAGC |
| | | CAGGACAGGCCCCTGTGCTGGTGCTCTACGGGAAGAACAATC |
| | | GGCCCAGCGGAGTGCCGGACAGGTTCTCGGGTTCACGCTCCG |
| | | GTACAACCGCTTCACTGACTATCACCGGGGCCCAGGCAGAGG |
| | | ATGAAGCGGACTACTACTGTTCCTCCCGGGATTCATCCGGCG |
| | | ACCACCTCCGGGTGTTCGGAACCGGAACGAAGGTCACCGTGC |
| | | TG |
| 149368-aa | 177 | QVQLVQSGAEVKKPGSSVKVSCKASGGTFSSYAISWVRQAPGQ |
| VH | | GLEWMGGIIPIFGTANYAQKFQGRVTITADESTSTAYMELSSLRS |
| | | EDTAVYYCARRGGYQLLRWDVGLLRSAFDIWGQGTMVTVSS |
| 149368-aa | 198 | SYVLTQPPSVSVAPGQTARITCGGNNIGSKSVHWYQQKPGQAPV |
| VL | | LVLYGKNNRPSGVPDRFSGSRSGTTASLTITGAQAEDEADYYCS |
| | | SRDSSGDHLRVFGTGTKVTVL |
| 149368-aa | 219 | MALPVTALLLPLALLLHAARPQVQLVQSGAEVKKPGSSVKVSC |
| Full CAR | | KASGGTFSSYAISWVRQAPGQGLEWMGGIIPIFGTANYAQKFQG |
| | | RVTITADESTSTAYMELSSLRSEDTAVYYCARRGGYQLLRWDV |
| | | GLLRSAFDIWGQGTMVTVSSGGGGSGGGGSGGGGSSYVLTQPP |
| | | SVSVAPGQTARITCGGNNIGSKSVHWYQQKPGQAPVLVLYGKN |
| | | NRPSGVPDRFSGSRSGTTASLTITGAQAEDEADYYCSSRDSSGDH |
| | | LRVFGTGTKVTVLTTTPAPRPPTPAPTIASQPLSLRPEACRPAAGG |
| | | AVHTRGLDFACDIYIWAPLAGTCGVLLLSLVITLYCKRGRKKLL |
| | | YIFKQPFMRPVQTTQEEDGCSCRFPEEEEGGCELRVKFSRSADAP |
| | | AYKQGQNQLYNELNLGRREEYDVLDKRRGRDPEMGGKPRRKN |
| | | PQEGLYNELQKDKMAEAYSEIGMKGERRRGKGHDGLYQGLST |
| | | ATKDTYDALHMQALPPR |
| 149368-nt | 240 | ATGGCCCTCCCTGTCACCGCCCTGCTGCTTCCGCTGGCTCTTC |
| Full CAR | | TGCTCCACGCCGCTCGGCCCCAAGTGCAGCTGGTCCAGTCGG |
| | | GCGCCGAGGTCAAGAAGCCCGGGAGCTCTGTGAAAGTGTCCT |
| | | GCAAGGCCTCCGGGGGCACCTTTAGCTCCTACGCCATCTCCTG |
| | | GGTCCGCCAAGCACCGGGTCAAGGCCTGGAGTGGATGGGGG |
| | | GAATTATCCCTATCTTCGGCACTGCCAACTACGCCCAGAAGTT |
| | | CCAGGGACGCGTGACCATTACCGCGGACGAATCCACCTCCAC |
| | | CGCTTATATGGAGCTGTCCAGCTTGCGCTCGGAAGATACCGC |
| | | CGTGTACTACTGCGCCCGGAGGGGTGGATACCAGCTGCTGAG |
| | | ATGGGACGTGGGCCTCCTGCGGTCGGCGTTCGACATCTGGGG |
| | | CCAGGGCACTATGGTCACTGTGTCCAGCGGAGGAGGCGGATC |
| | | GGGAGGCGGCGGATCAGGGGGAGGCGGTTCCAGCTACGTGCT |
| | | TACTCAACCCCCTTCGGTGTCCGTGGCCCCGGGACAGACCGC |
| | | CAGAATCACTTGCGGAGGAAACAACATTGGGTCCAAGAGCGT |
| | | GCATTGGTACCAGCAGAAGCCAGGACAGGCCCCTGTGCTGGT |
| | | GCTCTACGGGAAGAACAATCGGCCCAGCGGAGTGCCGGACA |
| | | GGTTCTCGGGTTCACGCTCCGGTACAACCGCTTCACTGACTAT |
| | | CACCGGGGCCCAGGCAGAGGATGAAGCGGACTACTACTGTTC |
| | | CTCCCGGGATTCATCCGGCGACCACCTCCGGGTGTTCGGAAC |
| | | CGGAACGAAGGTCACCGTGCTGACCACTACCCCAGCACCGAG |
| | | GCCACCCACCCCGGCTCCTACCATCGCCTCCCAGCCTCTGTCC |
| | | CTGCGTCCGGAGGCATGTAGACCCGCAGCTGGTGGGGCCGTG |
| | | CATACCCGGGGTCTTGACTTCGCCTGCGATATCTACATTTGGG |
| | | CCCCTCTGGCTGGTACTTGCGGGGTCCTGCTGCTTTCACTCGT |
| | | GATCACTCTTTACTGTAAGCGCGGTCGGAAGAAGCTGCTGTA |
| | | CATCTTTAAGCAACCCTTCATGAGGCCTGTGCAGACTACTCAA |
| | | GAGGAGGACGGCTGTTCATGCCGGTTCCCAGAGGAGGAGGA |
| | | AGGCGGCTGCGAACTGCGCGTGAAATTCAGCCGCAGCGCAGA |
| | | TGCTCCAGCCTACAAGCAGGGGCAGAACCAGCTCTACAACGA |
| | | ACTCAATCTTGGTCGGAGAGAGGAGTACGACGTGCTGGACAA |
| | | GCGGAGAGGACGGGACCCAGAAATGGGCGGGAAGCCGCGCA |
| | | GAAAGAATCCCCAAGAGGGCCTGTACAACGAGCTCCAAAAG |
| | | GATAAGATGGCAGAAGCCTATAGCGAGATTGGTATGAAAGG |
| | | GGAACGCAGAAGAGGCAAAGGCCACGACGGACTGTACCAGG |
| | | GACTCAGCACCGCCACCAAGGACACCTATGACGCTCTTCACA |
| | | TGCAGGCCCTGCCGCCTCGG |

149369

| | | |
|---|---|---|
| 149369-aa | 136 | EVQLQQSGPGLVKPSQTLSLTCAISGDSVSSNSAAWNWIRQSPSR |
| ScFv | | GLEWLGRTYYRSKWYSFYAISLKSRIIINPDTSKNQFSLQLKSVTP |
| domain | | EDTAVYYCARSSPEGLFLYWFDPWGQGTLVTVSSGGDGSGGGG |
| | | SGGGGSSSELTQDPAVSVALGQTIRITCQGDSLGNYYATWYQQK |
| | | PGQAPVLVIYGTNNRPSGIPDRFSASSSGNTASLTITGAQAEDEA |
| | | DYYCNSRDSSGHHLLFGTGTKVTVL |
| 149369-nt | 157 | GAAGTGCAGCTCCAACAGTCAGGACCGGGGCTCGTGAAGCCA |
| ScFv | | TCCCAGACCCTGTCCCTGACTTGTGCCATCTCGGGAGATAGCG |
| domain | | TGTCATCGAACTCCGCCGCCTGGAACTGGATTCGGCAGAGCC |
| | | CGTCCCGCGGACTGGAGTGGCTTGGAAGGACCTACTACCGGT |
| | | CCAAGTGGTACTCTTTCTACGCGATCTCGCTGAAGTCCCGCAT |
| | | TATCATTAACCCTGATACCTCCAAGAATCAGTTCTCCCTCCAA |
| | | CTGAAATCCGTCACCCCCGAGGACACAGCAGTGTATTACTGC |
| | | GCACGGAGCAGCCCCGAAGGACTGTTCCTGTATTGGTTTGAC |
| | | CCCTGGGGCCAGGGGACTCTTGTGACCGTGTCGAGCGGCGGA |
| | | GATGGGTCCGGTGGCGGTGGTTCGGGGGGCGGCGGATCATCA |
| | | TCCGAACTGACCCAGGACCCGGCTGTGTCCGTGGCGCTGGGA |
| | | CAAACCATCCGCATTACGTGCCAGGGAGACTCCCTGGGCAAC |
| | | TACTACGCCACTTGGTACCAGCAGAAGCCGGGCCAAGCCCCT |
| | | GTGTTGGTCATCTACGGGACCAACAACAGACCTTCCGGCATC |
| | | CCCGACCGGTTCAGCGCTTCGTCCTCCGGCAACACTGCCAGCC |
| | | TGACCATCACTGGAGCGCAGGCCGAAGATGAGGCCGACTACT |
| | | ACTGCAACAGCAGAGACTCCTCGGGTCATCACCTCTTGTTCGG |
| | | AACTGGAACCAAGGTCACCGTGCTG |
| 149369-aa | 178 | EVQLQQSGPGLVKPSQTLSLTCAISGDSVSSNSAAWNWIRQSPSR |
| VH | | GLEWLGRTYYRSKWYSFYAISLKSRIIINPDTSKNQFSLQLKSVTP |
| | | EDTAVYYCARSSPEGLFLYWFDPWGQGTLVTVSS |
| 149369-aa | 199 | SSELTQDPAVSVALGQTRITCQGDSLGNYYATWYQQKPGQAPV |
| VL | | LVIYGTNNRPSGIPDRFSASSSGNTASLTITGAQAEDEADYYCNS |
| | | RDSSGHHLLFGTGTKVTVL |
| 149369-aa | 220 | MALPVTALLLPLALLLHAARPEVQLQQSGPGLVKPSQTLSLTCAI |
| Full CAR | | SGDSVSSNSAAWNWIRQSPSRGLEWLGRTYYRSKWYSFYAISLK |
| | | SRIIINPDTSKNQFSLQLKSVTPEDTAVYYCARSSPEGLFLYWFDP |
| | | WGQGTLVTVSSGGDGSGGGGSGGGGSSSELTQDPAVSVALGQT |
| | | IRITCQGDSLGNYYATWYQQKPGQAPVLVIYGTNNRPSGIPDRFS |
| | | ASSSGNTASLTITGAQAEDEADYYCNSRDSSGHHLLFGTGTKVT |
| | | VLTTTPAPRPPTPAPTIASQPLSLRPEACRPAAGGAVHTRGLDFA |
| | | CDIYIWAPLAGTCGVLLLSLVITLYCKRGRKKLLYIFKQPFMRPV |
| | | QTTQEEDGCSCRFPEEEEGGCELRVKFSRSADAPAYKQGQNQLY |
| | | NELNLGRREEYDVLDKRRGRDPEMGGKPRRKNPQEGLYNELQK |
| | | DKMAEAYSEIGMKGERRRGKGHDGLYQGLSTATKDTYDALHM |
| | | QALPPR |
| 149369-nt | 241 | ATGGCCCTCCCTGTCACCGCCCTGCTGCTTCCGCTGGCTCTTC |
| Full CAR | | TGCTCCACGCCGCTCGGCCCGAAGTGCAGCTCCAACAGTCAG |
| | | GACCGGGGCTCGTGAAGCCATCCCAGACCCTGTCCCTGACTT |
| | | GTGCCATCTCGGGAGATAGCGTGTCATCGAACTCCGCCGCCT |
| | | GGAACTGGATTCGGCAGAGCCCGTCCCGCGGACTGGAGTGGC |
| | | TTGGAAGGACCTACTACCGGTCCAAGTGGTACTCTTTCTACGC |
| | | GATCTCGCTGAAGTCCCGCATTATCATTAACCCTGATACCTCC |
| | | AAGAATCAGTTCTCCCTCCAACTGAAATCCGTCACCCCCGAG |
| | | GACACAGCAGTGTATTACTGCGCACGGAGCAGCCCCGAAGGA |
| | | CTGTTCCTGTATTGGTTTGACCCCTGGGGCCAGGGGACTCTTG |
| | | TGACCGTGTCGAGCGGCGGAGATGGGTCCGGTGGCGGTGGTT |
| | | CGGGGGGCGGCGGATCATCATCCGAACTGACCCAGGACCCGG |
| | | CTGTGTCCGTGGCGCTGGGACAAACCATCCGCATTACGTGCC |
| | | AGGGAGACTCCCTGGGCAACTACTACGCCACTTGGTACCAGC |
| | | AGAAGCCGGGCCAAGCCCCTGTGTTGGTCATCTACGGGACCA |
| | | ACAACAGACCTTCCGGCATCCCCGACCGGTTCAGCGCTTCGTC |
| | | CTCCGGCAACACTGCCAGCCTGACCATCACTGGAGCGCAGGC |
| | | CGAAGATGAGGCCGACTACTACTGCAACAGCAGAGACTCCTC |
| | | GGGTCATCACCTCTTGTTCGGAACTGGAACCAAGGTCACCGT |
| | | GCTGACCACTACCCCAGCACCGAGGCCACCCACCCCGGCTCC |
| | | TACCATCGCCTCCCAGCCTCTGTCCCTGCGTCCGGAGGCATGT |
| | | AGACCCGCAGCTGGTGGGGCCGTGCATACCCGGGGTCTTGAC |
| | | TTCGCCTGCGATATCTACATTTGGGCCCCTCTGGCTGGTACTT |
| | | GCGGGGTCCTGCTGCTTTCACTCGTGATCACTCTTTACTGTAA |
| | | GCGCGGTCGGAAGAAGCTGCTGTACATCTTTAAGCAACCCTT |
| | | CATGAGGCCTGTGCAGACTACTCAAGAGGAGGACGGCTGTTC |
| | | ATGCCGGTTCCCAGAGGAGGAGGAAGGCGGCTGCGAACTGC |
| | | GCGTGAAATTCAGCCGCAGCGCAGATGCTCCAGCCTACAAGC |
| | | AGGGGCAGAACCAGCTCTACAACGAACTCAATCTTGGTCGGA |
| | | GAGAGGAGTACGACGTGCTGGACAAGCGGAGAGGACGGGAC |
| | | CCAGAAATGGGCGGGAAGCCGCGCAGAAAGAATCCCCAAGA |
| | | GGGCCTGTACAACGAGCTCCAAAAGGATAAGATGGCAGAAG |
| | | CCTATAGCGAGATTGGTATGAAAGGGGAACGCAGAAGAGGC |
| | | AAAGGCCACGACGGACTGTACCAGGGACTCAGCACCGCCACC |
| | | AAGGACACCTATGACGCTCTTCACATGCAGGCCCTGCCGCCT |
| | | CGG |

BCMA_EBB-C1978-A4

| | | |
|---|---|---|
| BCMA_EBB- | 137 | EVQLVESGGGLVQPGGSLRLSCAASGFTFSSYAMSWVRQAPGK |
| C1978-A4- | | GLEWVSAISGSGGSTYYADSVKGRFTISRDNSKNTLYLQMNSLR |
| aa | | AEDTAVYYCAKVEGSGSLDYWGQGTLVTVSSGGGGSGGGGSG |
| ScFv | | GGGSEIVMTQSPGTLSLSPGERATLSCRASQSVSSAYLAWYQQK |
| domain | | PGQPPRLLISGASTRATGIPDRFGGSGSGTDFTLTISRLEPEDFAVY |
| | | YCQHYGSSFNGSSLFTFGQGTRLEIK |
| BCMA_EBB- | 158 | GAAGTGCAGCTCGTGGAGTCAGGAGGCGGCCTGGTCCAGCCG |
| C1978-A4- | | GGAGGGTCCCTTAGACTGTCATGCGCCGCAAGCGGATTCACT |
| nt | | TTCTCCTCCTATGCCATGAGCTGGGTCCGCCAAGCCCCCGGAA |
| ScFv | | AGGGACTGGAATGGGTGTCCGCCATCTCGGGGTCTGGAGGCT |
| domain | | CAACTTACTACGCTGACTCCGTGAAGGGACGGTTCACCATTA |
| | | GCCGCGACAACTCCAAGAACACCCTCTACCTCCAAATGAACT |
| | | CCCTGCGGGCCGAGGATACCGCCGTCTACTACTGCGCCAAAG |
| | | TGGAAGGTTCAGGATCGCTGGACTACTGGGGACAGGGTACTC |
| | | TCGTGACCGTGTCATCGGGCGGAGGAGGTTCCGGCGGTGGCG |
| | | GCTCCGGCGGCGGAGGGTCGGAGATCGTGATGACCCAGAGCC |
| | | CTGGTACTCTGAGCCTTTCGCCGGGAGAAAGGGCCACCCTGT |
| | | CCTGCCGCGCTTCCCAATCCGTGTCCTCCGCGTACTTGGCGTG |
| | | GTACCAGCAGAAGCCGGGACAGCCCCCTCGGCTGCTGATCAG |
| | | CGGGGCCAGCACCCGGGCAACCGGAATCCCAGACAGATTCGG |
| | | GGGTTCCGGCAGCGGCACAGATTTCACCCTGACTATTTCGAG |
| | | GTTGGAGCCCGAGGACTTTGCGGTGTATTACTGTCAGCACTAC |
| | | GGGTCGTCCTTTAATGGCTCCAGCCTGTTCACGTTCGGACAGG |
| | | GGACCCGCCTGGAAATCAAG |
| BCMA_EBB- | 179 | EVQLVESGGGLVQPGGSLRLSCAASGFTFSSYAMSWVRQAPGK |
| C1978-A4- | | GLEWVSAISGSGGSTYYADSVKGRFTISRDNSKNTLYLQMNSLR |
| aa | | AEDTAVYYCAKVEGSGSLDYWGQGTLVTVSS |
| VH | | |
| BCMA_EBB- | 200 | EIVMTQSPGTLSLSPGERATLSCRASQSVSSAYLAWYQQKPGQPP |
| C1978-A4- | | RLLISGASTRATGIPDRFGGSGSGTDFTLTISRLEPEDFAVYYCQH |
| aa | | YGSSFNGSSLFTFGQGTRLEIK |
| VL | | |
| BCMA_EBB- | 221 | MALPVTALLLPLALLLHAARPEVQLVESGGGLVQPGGSLRLSCA |
| C1978-A4- | | ASGFTFSSYAMSWVRQAPGKGLEWVSAISGSGGSTYYADSVKG |
| aa | | RFTISRDNSKNTLYLQMNSLRAEDTAVYYCAKVEGSGSLDYWG |
| Full CART | | QGTLVTVSSGGGGSGGGGSGGGGSEIVMTQSPGTLSLSPGERAT |
| | | LSCRASQSVSSAYLAWYQQKPGQPPRLLISGASTRATGIPDRFGG |
| | | SGSGTDFTLTISRLEPEDFAVYYCQHYGSSFNGSSLFTFGQGTRLE |
| | | IKTTTPAPRPPTPAPTIASQPLSLRPEACRPAAGGAVHTRGLDFAC |
| | | DIYIWAPLAGTCGVLLLSLVITLYCKRGRKKLLYIFKQPFMRPVQ |
| | | TTQEEDGCSCRFPEEEEGGCELRVKFSRSADAPAYKQGQNQLYN |
| | | ELNLGRREEYDVLDKRRGRDPEMGGKPRRKNPQEGLYNELQKD |
| | | KMAEAYSEIGMKGERRRGKGHDGLYQGLSTATKDTYDALHMQ |
| | | ALPPR |
| BCMA_EBB- | 242 | ATGGCCCTCCCTGTCACCGCCCTGCTGCTTCCGCTGGCTCTTC |
| C1978-A4- | | TGCTCCACGCCGCTCGGCCCGAAGTGCAGCTCGTGGAGTCAG |
| nt | | GAGGCGGCCTGGTCCAGCCGGGAGGGTCCCTTAGACTGTCAT |
| Full CART | | GCGCCGCAAGCGGATTCACTTTCTCCTCCTATGCCATGAGCTG |
| | | GGTCCGCCAAGCCCCCGGAAAGGGACTGGAATGGGTGTCCGC |
| | | CATCTCGGGGTCTGGAGGCTCAACTTACTACGCTGACTCCGTG |
| | | AAGGGACGGTTCACCATTAGCCGCGACAACTCCAAGAACACC |
| | | CTCTACCTCCAAATGAACTCCCTGCGGGCCGAGGATACCGCC |
| | | GTCTACTACTGCGCCAAAGTGGAAGGTTCAGGATCGCTGGAC |
| | | TACTGGGGACAGGGTACTCTCGTGACCGTGTCATCGGGCGGA |
| | | GGAGGTTCCGGCGGTGGCGGCTCCGGCGGCGGAGGGTCGGA |
| | | GATCGTGATGACCCAGAGCCCTGGTACTCTGAGCCTTTCGCCG |
| | | GGAGAAAGGGCCACCCTGTCCTGCCGCGCTTCCCAATCCGTG |
| | | TCCTCCGCGTACTTGGCGTGGTACCAGCAGAAGCCGGGACAG |
| | | CCCCCTCGGCTGCTGATCAGCGGGGCCAGCACCCGGGCAACC |
| | | GGAATCCCAGACAGATTCGGGGGTTCCGGCAGCGGCACAGAT |
| | | TTCACCCTGACTATTTCGAGGTTGGAGCCCGAGGACTTTGCGG |
| | | TGTATTACTGTCAGCACTACGGGTCGTCCTTTAATGGCTCCAG |
| | | CCTGTTCACGTTCGGACAGGGGACCCGCCTGGAAATCAAGAC |
| | | CACTACCCCAGCACCGAGGCCACCCACCCCGGCTCCTACCAT |
| | | CGCCTCCCAGCCTCTGTCCCTGCGTCCGGAGGCATGTAGACCC |
| | | GCAGCTGGTGGGGCCGTGCATACCCGGGGTCTTGACTTCGCC |
| | | TGCGATATCTACATTTGGGCCCCTCTGGCTGGTACTTGCGGGG |
| | | TCCTGCTGCTTTCACTCGTGATCACTCTTTACTGTAAGCGCGG |
| | | TCGGAAGAAGCTGCTGTACATCTTTAAGCAACCCTTCATGAG |
| | | GCCTGTGCAGACTACTCAAGAGGAGGACGGCTGTTCATGCCG |
| | | GTTCCCAGAGGAGGAGGAAGGCGGCTGCGAACTGCGCGTGA |
| | | AATTCAGCCGCAGCGCAGATGCTCCAGCCTACAAGCAGGGGC |
| | | AGAACCAGCTCTACAACGAACTCAATCTTGGTCGGAGAGAGG |
| | | AGTACGACGTGCTGGACAAGCGGAGAGGACGGGACCCAGAA |
| | | ATGGGCGGGAAGCCGCGCAGAAAGAATCCCCAAGAGGGCCT |
| | | GTACAACGAGCTCCAAAAGGATAAGATGGCAGAAGCCTATA |
| | | GCGAGATTGGTATGAAAGGGGAACGCAGAAGAGGCAAAGGC |
| | | CACGACGGACTGTACCAGGGACTCAGCACCGCCACCAAGGAC |
| | | ACCTATGACGCTCTTCACATGCAGGCCCTGCCGCCTCGG |

BCMA_EBB-C1978-G1

| | | |
|---|---|---|
| BCMA_EBB- | 138 | EVQLVETGGGLVQPGGSLRLSCAASGITFSRYPMSWVRQAPGKG |
| C1978-G1- | | LEWVSGISDSGVSTYYADSAKGRFTISRDNSKNTLFLQMSSLRDE |
| aa | | DTAVYYCVTRAGSEASDIWGQGTMVTVSSGGGGSGGGGSGGG |
| ScFv | | GSEIVLTQSPATLSLSPGERATLSCRASQSVSNSLAWYQQKPGQA |
| domain | | PRLLIYDASSRATGIPDRFSGSGSGTDFTLTISRLEPEDFAIYYCQQ |
| | | FGTSSGLTFGGGTKLEIK |
| BCMA_EBB- | 159 | GAAGTGCAACTGGTGGAAACCGGTGGCGGCCTGGTGCAGCCT |
| C1978-G1- | | GGAGGATCATTGAGGCTGTCATGCGCGGCCAGCGGTATTACC |
| nt | | TTCTCCCGGTACCCCATGTCCTGGGTCAGACAGGCCCCGGGG |
| ScFv | | AAAGGGCTTGAATGGGTGTCCGGGATCTCGGACTCCGGTGTC |
| domain | | AGCACTTACTACGCCGACTCCGCCAAGGGACGCTTCACCATTT |
| | | CCCGGGACAACTCGAAGAACACCCTGTTCCTCCAAATGAGCT |
| | | CCCTCCGGGACGAGGATACTGCAGTGTACTACTGCGTGACCC |
| | | GCGCCGGGTCCGAGGCGTCTGACATTTGGGGACAGGGCACTA |
| | | TGGTCACCGTGTCGTCCGGCGGAGGGGGCTCGGGAGGCGGTG |
| | | GCAGCGGAGGAGGAGGGTCCGAGATCGTGCTGACCCAATCCC |
| | | CGGCCACCCTCTCGCTGAGCCCTGGAGAAAGGGCAACCTTGT |
| | | CCTGTCGCGCGAGCCAGTCCGTGAGCAACTCCCTGGCCTGGT |
| | | ACCAGCAGAAGCCCGGACAGGCTCCGAGACTTCTGATCTACG |
| | | ACGCTTCGAGCCGGGCCACTGGAATCCCCGACCGCTTTTCGG |
| | | GGTCCGGCTCAGGAACCGATTTCACCCTGACAATCTCACGGC |
| | | TGGAGCCAGAGGATTTCGCCATCTATTACTGCCAGCAGTTCG |
| | | GTACTTCCTCCGGCCTGACTTTCGGAGGCGGCACGAAGCTCG |
| | | AAATCAAG |
| BCMA_EBB- | 180 | EVQLVETGGGLVQPGGSLRLSCAASGITFSRYPMSWVRQAPGKG |
| C1978-G1- | | LEWVSGISDSGVSTYYADSAKGRFTISRDNSKNTLFLQMSSLRDE |
| aa | | DTAVYYCVTRAGSEASDIWGQGTMVTVSS |
| VH | | |
| BCMA_EBB- | 201 | EIVLTQSPATLSLSPGERATLSCRASQSVSNSLAWYQQKPGQAPR |
| C1978-G1- | | LLIYDASSRATGIPDRFSGSGSGTDFTLTISRLEPEDFAIYYCQQFG |
| aa | | TSSGLTFGGGTKLEIK |
| VL | | |
| BCMA_EBB- | 222 | MALPVTALLLPLALLLHAARPEVQLVETGGGLVQPGGSLRLSCA |
| C1978-G1 | | ASGITFSRYPMSWVRQAPGKGLEWVSGISDSGVSTYYADSAKGR |
| aa | | FTISRDNSKNTLFLQMSSLRDEDTAVYYCVTRAGSEASDIWGQG |
| Full CART | | TMVTVSSGGGGSGGGGSGGGGSEIVLTQSPATLSLSPGERATLSC |
| | | RASQSVSNSLAWYQQKPGQAPRLLIYDASSRATGIPDRFSGSGSG |
| | | TDFTLTISRLEPEDFAIYYCQQFGTSSGLTFGGGTKLEIKTTTPAPR |
| | | PPTPAPTIASQPLSLRPEACRPAAGGAVHTRGLDFACDIYIWAPL |
| | | AGTCGVLLLSLVITLYCKRGRKKLLYIFKQPFMRPVQTTQEEDG |
| | | CSCRFPEEEEGGCELRVKFSRSADAPAYKQGQNQLYNELNLGRR |
| | | EEYDVLDKRRGRDPEMGGKPRRKNPQEGLYNELQKDKMAEAY |
| | | SEIGMKGERRRGKGHDGLYQGLSTATKDTYDALHMQALPPR |
| BCMA_EBB- | 243 | ATGGCCCTCCCTGTCACCGCCCTGCTGCTTCCGCTGGCTCTTC |
| C1978-G1- | | TGCTCCACGCCGCTCGGCCCGAAGTGCAACTGGTGGAAACCG |
| nt | | GTGGCGGCCTGGTGCAGCCTGGAGGATCATTGAGGCTGTCAT |
| Full CART | | GCGCGGCCAGCGGTATTACCTTCTCCCGGTACCCCATGTCCTG |
| | | GGTCAGACAGGCCCCGGGGAAAGGGCTTGAATGGGTGTCCGG |
| | | GATCTCGGACTCCGGTGTCAGCACTTACTACGCCGACTCCGCC |
| | | AAGGGACGCTTCACCATTTCCCGGGACAACTCGAAGAACACC |
| | | CTGTTCCTCCAAATGAGCTCCCTCCGGGACGAGGATACTGCA |
| | | GTGTACTACTGCGTGACCCGCGCCGGGTCCGAGGCGTCTGAC |
| | | ATTTGGGGACAGGGCACTATGGTCACCGTGTCGTCCGGCGGA |
| | | GGGGGCTCGGGAGGCGGTGGCAGCGGAGGAGGAGGGTCCGA |
| | | GATCGTGCTGACCCAATCCCCGGCCACCCTCTCGCTGAGCCCT |
| | | GGAGAAAGGGCAACCTTGTCCTGTCGCGCGAGCCAGTCCGTG |
| | | AGCAACTCCCTGGCCTGGTACCAGCAGAAGCCCGGACAGGCT |
| | | CCGAGACTTCTGATCTACGACGCTTCGAGCCGGGCCACTGGA |
| | | ATCCCCGACCGCTTTTCGGGGTCCGGCTCAGGAACCGATTTCA |
| | | CCCTGACAATCTCACGGCTGGAGCCAGAGGATTTCGCCATCT |
| | | ATTACTGCCAGCAGTTCGGTACTTCCTCCGGCCTGACTTTCGG |
| | | AGGCGGCACGAAGCTCGAAATCAAGACCACTACCCCAGCACC |
| | | GAGGCCACCCACCCCGGCTCCTACCATCGCCTCCCAGCCTCTG |
| | | TCCCTGCGTCCGGAGGCATGTAGACCCGCAGCTGGTGGGGCC |
| | | GTGCATACCCGGGGTCTTGACTTCGCCTGCGATATCTACATTT |
| | | GGGCCCCTCTGGCTGGTACTTGCGGGGTCCTGCTGCTTTCACT |
| | | CGTGATCACTCTTTACTGTAAGCGCGGTCGGAAGAAGCTGCT |
| | | GTACATCTTTAAGCAACCCTTCATGAGGCCTGTGCAGACTACT |
| | | CAAGAGGAGGACGGCTGTTCATGCCGGTTCCCAGAGGAGGAG |
| | | GAAGGCGGCTGCGAACTGCGCGTGAAATTCAGCCGCAGCGCA |
| | | GATGCTCCAGCCTACAAGCAGGGGCAGAACCAGCTCTACAAC |
| | | GAACTCAATCTTGGTCGGAGAGAGGAGTACGACGTGCTGGAC |
| | | AAGCGGAGAGGACGGGACCCAGAAATGGGCGGGAAGCCGCG |
| | | CAGAAAGAATCCCCAAGAGGGCCTGTACAACGAGCTCCAAA |
| | | AGGATAAGATGGCAGAAGCCTATAGCGAGATTGGTATGAAA |
| | | GGGGAACGCAGAAGAGGCAAAGGCCACGACGGACTGTACCA |
| | | GGGACTCAGCACCGCCACCAAGGACACCTATGACGCTCTTCA |
| | | CATGCAGGCCCTGCCGCCTCGG |

BCMA_EBB-C1979-C1

| | | |
|---|---|---|
| BCMA_EBB- | 139 | QVQLVESGGGLVQPGGSLRLSCAASGFTFSSYAMSWVRQAPGK |
| C1979-C1- | | GLEWVSAISGSGGSTYYADSVKGRFTISRDNAKNSLYLQMNSLR |
| aa | | AEDTAIYYCARATYKRELRYYYGMDVWGQGTMVTVSSGGGGS |
| ScFv | | GGGGSGGGGSEIVMTQSPGTVSLSPGERATLSCRASQSVSSSFLA |
| domain | | WYQQKPGQAPRLLIYGASSRATGIPDRFSGSGSGTDFTLTISRLEP |
| | | EDSAVYYCQQYHSSPSWTFGQGTRLEIK |
| BCMA_EBB- | 160 | CAAGTGCAGCTCGTGGAATCGGGTGGCGGACTGGTGCAGCCG |
| C1979-C1- | | GGGGGCTCACTTAGACTGTCCTGCGCGGCCAGCGGATTCACT |
| nt | | TTCTCCTCCTACGCCATGTCCTGGGTCAGACAGGCCCCTGGAA |
| ScFv | | AGGGCCTGGAATGGGTGTCCGCAATCAGCGGCAGCGGCGGCT |
| domain | | CGACCTATTACGCGGATTCAGTGAAGGGCAGATTCACCATTT |
| | | CCCGGGACAACGCCAAGAACTCCTTGTACCTTCAAATGAACT |
| | | CCCTCCGCGCGGAAGATACCGCAATCTACTACTGCGCTCGGG |
| | | CCACTTACAAGAGGGAACTGCGCTACTACTACGGGATGGACG |
| | | TCTGGGGCCAGGGAACCATGGTCACCGTGTCCAGCGGAGGAG |
| | | GAGGATCGGGAGGAGGCGGTAGCGGGGGTGGAGGGTCGGAG |
| | | ATCGTGATGACCCAGTCCCCCGGCACTGTGTCGCTGTCCCCCG |
| | | GCGAACGGGCCACCCTGTCATGTCGGGCCAGCCAGTCAGTGT |
| | | CGTCAAGCTTCCTCGCCTGGTACCAGCAGAAACCGGGACAAG |
| | | CTCCCCGCCTGCTGATCTACGGAGCCAGCAGCCGGGCCACCG |
| | | GTATTCCTGACCGGTTCTCCGGTTCGGGGTCCGGGACCGACTT |
| | | TACTCTGACTATCTCTCGCCTCGAGCCAGAGGACTCCGCCGTG |
| | | TATTACTGCCAGCAGTACCACTCCTCCCCGTCCTGGACGTTCG |
| | | GACAGGGCACAAGGCTGGAGATTAAG |
| BCMA_EBB- | 181 | QVQLVESGGGLVQPGGSLRLSCAASGFTFSSYAMSWVRQAPGK |
| C1979-C1- | | GLEWVSAISGSGGSTYYADSVKGRFTISRDNAKNSLYLQMNSLR |
| aa | | AEDTAIYYCARATYKRELRYYYGMDVWGQGTMVTVSS |
| VH | | |
| BCMA_EBB- | 202 | EIVMTQSPGTVSLSPGERATLSCRASQSVSSSFLAWYQQKPGQAP |
| C1979-C1- | | RLLIYGASSRATGIPDRFSGSGSGTDFTLTISRLEPEDSAVYYCQQ |
| aa | | YHSSPSWTFGQGTRLEIK |
| VL | | |
| BCMA_EBB- | 223 | MALPVTALLLPLALLLHAARPQVQLVESGGGLVQPGGSLRLSCA |
| C1979-C1- | | ASGFTFSSYAMSWVRQAPGKGLEWVSAISGSGGSTYYADSVKG |
| aa | | RFTISRDNAKNSLYLQMNSLRAEDTAIYYCARATYKRELRYYYG |
| Full CART | | MDVWGQGTMVTVSSGGGGSGGGGSGGGGSEIVMTQSPGTVSL |
| | | SPGERATLSCRASQSVSSSFLAWYQQKPGQAPRLLIYGASSRATG |
| | | IPDRFSGSGSGTDFTLTISRLEPEDSAVYYCQQYHSSPSWTFGQGT |
| | | RLEIKTTTPAPRPPTPAPTIASQPLSLRPEACRPAAGGAVHTRGLD |
| | | FACDIYIWAPLAGTCGVLLLSLVITLYCKRGRKKLLYIFKQPFMR |
| | | PVQTTQEEDGCSCRFPEEEEGGCELRVKFSRSADAPAYKQGQNQ |
| | | LYNELNLGRREEYDVLDKRRGRDPEMGGKPRRKNPQEGLYNEL |
| | | QKDKMAEAYSEIGMKGERRRGKGHDGLYQGLSTATKDTYDAL |
| | | HMQALPPR |
| BCMA_EBB- | 244 | ATGGCCCTCCCTGTCACCGCCCTGCTGCTTCCGCTGGCTCTTC |
| C1979-C1- | | TGCTCCACGCCGCTCGGCCCCAAGTGCAGCTCGTGGAATCGG |
| nt | | GTGGCGGACTGGTGCAGCCGGGGGGCTCACTTAGACTGTCCT |
| Full CART | | GCGCGGCCAGCGGATTCACTTTCTCCTCCTACGCCATGTCCTG |
| | | GGTCAGACAGGCCCCTGGAAAGGGCCTGGAATGGGTGTCCGC |
| | | AATCAGCGGCAGCGGCGGCTCGACCTATTACGCGGATTCAGT |
| | | GAAGGGCAGATTCACCATTTCCCGGGACAACGCCAAGAACTC |
| | | CTTGTACCTTCAAATGAACTCCCTCCGCGCGGAAGATACCGC |
| | | AATCTACTACTGCGCTCGGGCCACTTACAAGAGGGAACTGCG |
| | | CTACTACTACGGGATGGACGTCTGGGGCCAGGGAACCATGGT |
| | | CACCGTGTCCAGCGGAGGAGGAGGATCGGGAGGAGGCGGTA |
| | | GCGGGGGTGGAGGGTCGGAGATCGTGATGACCCAGTCCCCCG |
| | | GCACTGTGTCGCTGTCCCCCGGCGAACGGGCCACCCTGTCAT |
| | | GTCGGGCCAGCCAGTCAGTGTCGTCAAGCTTCCTCGCCTGGTA |
| | | CCAGCAGAAACCGGGACAAGCTCCCCGCCTGCTGATCTACGG |
| | | AGCCAGCAGCCGGGCCACCGGTATTCCTGACCGGTTCTCCGG |
| | | TTCGGGGTCCGGGACCGACTTTACTCTGACTATCTCTCGCCTC |
| | | GAGCCAGAGGACTCCGCCGTGTATTACTGCCAGCAGTACCAC |
| | | TCCTCCCCGTCCTGGACGTTCGGACAGGGCACAAGGCTGGAG |
| | | ATTAAGACCACTACCCCAGCACCGAGGCCACCCACCCCGGCT |
| | | CCTACCATCGCCTCCCAGCCTCTGTCCCTGCGTCCGGAGGCAT |
| | | GTAGACCCGCAGCTGGTGGGGCCGTGCATACCCGGGGTCTTG |
| | | ACTTCGCCTGCGATATCTACATTTGGGCCCCTCTGGCTGGTAC |
| | | TTGCGGGGTCCTGCTGCTTTCACTCGTGATCACTCTTTACTGT |
| | | AAGCGCGGTCGGAAGAAGCTGCTGTACATCTTTAAGCAACCC |
| | | TTCATGAGGCCTGTGCAGACTACTCAAGAGGAGGACGGCTGT |
| | | TCATGCCGGTTCCCAGAGGAGGAGGAAGGCGGCTGCGAACTG |
| | | CGCGTGAAATTCAGCCGCAGCGCAGATGCTCCAGCCTACAAG |
| | | CAGGGGCAGAACCAGCTCTACAACGAACTCAATCTTGGTCGG |
| | | AGAGAGGAGTACGACGTGCTGGACAAGCGGAGAGGACGGGA |
| | | CCCAGAAATGGGCGGGAAGCCGCGCAGAAAGAATCCCCAAG |
| | | AGGGCCTGTACAACGAGCTCCAAAAGGATAAGATGGCAGAA |
| | | GCCTATAGCGAGATTGGTATGAAAGGGGAACGCAGAAGAGG |
| | | CAAAGGCCACGACGGACTGTACCAGGGACTCAGCACCGCCAC |
| | | CAAGGACACCTATGACGCTCTTCACATGCAGGCCCTGCCGCC |
| | | TCGG |

BCMA_EBB-C1978-C7

| | | |
|---|---|---|
| BCMA_EBB- | 140 | EVQLVETGGGLVQPGGSLRLSCAASGFTFSSYAMSWVRQAPGK |
| C1978-C7- | | GLEWVSAISGSGGSTYYADSVKGRFTISRDNSKNTLYLQMNTLK |
| aa | | AEDTAVYYCARATYKRELRYYYGMDVWGQGTTVTVSSGGGGS |
| ScFv | | GGGGSGGGGSEIVLTQSPSTLSLSPGESATLSCRASQSVSTTFLA |
| domain | | WYQQKPGQAPRLLIYGSSNRATGIPDRFSGSGSGTDFTLTIRRLEP |
| | | EDFAVYYCQQYHSSPSWTFGQGTKVEIK |
| BCMA_EBB- | 161 | GAGGTGCAGCTTGTGGAAACCGGTGGCGGACTGGTGCAGCCC |
| C1978-C7- | | GGAGGAAGCCTCAGGCTGTCCTGCGCCGCGTCCGGCTTCACC |
| nt | | TTCTCCTCGTACGCCATGTCCTGGGTCCGCCAGGCCCCCGGAA |
| ScFv | | AGGGCCTGGAATGGGTGTCCGCCATCTCTGGAAGCGGAGGTT |
| domain | | CCACGTACTACGCGGACAGCGTCAAGGGAAGGTTCACAATCT |
| | | CCCGCGATAATTCGAAGAACACTCTGTACCTTCAAATGAACA |
| | | CCCTGAAGGCCGAGGACACTGCTGTGTACTACTGCGCACGGG |
| | | CCACCTACAAGAGAGAGCTCCGGTACTACTACGGAATGGACG |
| | | TCTGGGGCCAGGGAACTACTGTGACCGTGTCCTCGGGAGGGG |
| | | GTGGCTCCGGGGGGGGCGGCTCCGGCGGAGGCGGTTCCGAGA |
| | | TTGTGCTGACCCAGTCACCTTCAACTCTGTCGCTGTCCCCGGG |
| | | AGAGAGCGCTACTCTGAGCTGCCGGGCCAGCCAGTCCGTGTC |
| | | CACCACCTTCCTCGCCTGGTATCAGCAGAAGCCGGGGCAGGC |
| | | ACCACGGCTCTTGATCTACGGGTCAAGCAACAGAGCGACCGG |
| | | AATTCCTGACCGCTTCTCGGGGAGCGGTTCAGGCACCGACTTC |
| | | ACCCTGACTATCCGGCGCCTGGAACCCGAAGATTTCGCCGTG |
| | | TATTACTGTCAACAGTACCACTCCTCGCCGTCCTGGACCTTTG |
| | | GCCAAGGAACCAAAGTGGAAATCAAG |
| BCMA_EBB- | 182 | EVQLVETGGGLVQPGGSLRLSCAASGFTFSSYAMSWVRQAPGK |
| C1978-C7- | | GLEWVSAISGSGGSTYYADSVKGRFTISRDNSKNTLYLQMNTLK |
| aa | | AEDTAVYYCARATYKRELRYYYGMDVWGQGTTVTVSS |
| VH | | |
| BCMA_EBB- | 203 | EIVLTQSPSTLSLSPGESATLSCRASQSVSTTFLAWYQQKPGQAP |
| C1978-C7- | | RLLIYGSSNRATGIPDRFSGSGSGTDFTLTIRRLEPEDFAVYYCQQ |
| aa | | YHSSPSWTFGQGTKVEIK |
| VL | | |
| BCMA_EBB- | 224 | MALPVTALLLPLALLLHAARPEVQLVETGGGLVQPGGSLRLSCA |
| C1978-C7- | | ASGFTFSSYAMSWVRQAPGKGLEWVSAISGSGGSTYYADSVKG |
| aa | | RFTISRDNSKNTLYLQMNTLKAEDTAVYYCARATYKRELRYYY |
| Full CART | | GMDVWGQGTTVTVSSGGGGSGGGGSGGGGSEIVLTQSPSTLSLS |
| | | PGESATLSCRASQSVSTTFLAWYQQKPGQAPRLLIYGSSNRATGI |
| | | PDRFSGSGSGTDFTLTIRRLEPEDFAVYYCQQYHSSPSWTFGQGT |
| | | KVEIKTTTPAPRPPTPAPTIASQPLSLRPEACRPAAGGAVHTRGLD |
| | | FACDIYIWAPLAGTCGVLLLSLVITLYCKRGRKKLLYIFKQPFMR |
| | | PVQTTQEEDGCSCRFPEEEEGGCELRVKFSRSADAPAYKQGQNQ |
| | | LYNELNLGRREEYDVLDKRRGRDPEMGGKPRRKNPQEGLYNEL |
| | | QKDKMAEAYSEIGMKGERRRGKGHDGLYQGLSTATKDTYDAL |
| | | HMQALPPR |
| BCMA_EBB- | 245 | ATGGCCCTCCCTGTCACCGCCCTGCTGCTTCCGCTGGCTCTTC |
| C1978-C7- | | TGCTCCACGCCGCTCGGCCCGAGGTGCAGCTTGTGGAAACCG |
| nt | | GTGGCGGACTGGTGCAGCCCGGAGGAAGCCTCAGGCTGTCCT |
| Full CART | | GCGCCGCGTCCGGCTTCACCTTCTCCTCGTACGCCATGTCCTG |
| | | GGTCCGCCAGGCCCCCGGAAAGGGCCTGGAATGGGTGTCCGC |
| | | CATCTCTGGAAGCGGAGGTTCCACGTACTACGCGGACAGCGT |
| | | CAAGGGAAGGTTCACAATCTCCCGCGATAATTCGAAGAACAC |
| | | TCTGTACCTTCAAATGAACACCCTGAAGGCCGAGGACACTGC |
| | | TGTGTACTACTGCGCACGGGCCACCTACAAGAGAGAGCTCCG |
| | | GTACTACTACGGAATGGACGTCTGGGGCCAGGGAACTACTGT |
| | | GACCGTGTCCTCGGGAGGGGGTGGCTCCGGGGGGGGCGGCTC |
| | | CGGCGGAGGCGGTTCCGAGATTGTGCTGACCCAGTCACCTTC |
| | | AACTCTGTCGCTGTCCCCGGGAGAGAGCGCTACTCTGAGCTG |
| | | CCGGGCCAGCCAGTCCGTGTCCACCACCTTCCTCGCCTGGTAT |
| | | CAGCAGAAGCCGGGGCAGGCACCACGGCTCTTGATCTACGGG |
| | | TCAAGCAACAGAGCGACCGGAATTCCTGACCGCTTCTCGGGG |
| | | AGCGGTTCAGGCACCGACTTCACCCTGACTATCCGGCGCCTG |
| | | GAACCCGAAGATTTCGCCGTGTATTACTGTCAACAGTACCACT |
| | | CCTCGCCGTCCTGGACCTTTGGCCAAGGAACCAAAGTGGAAA |
| | | TCAAGACCACTACCCCAGCACCGAGGCCACCCACCCCGGCTC |
| | | CTACCATCGCCTCCCAGCCTCTGTCCCTGCGTCCGGAGGCATG |
| | | TAGACCCGCAGCTGGTGGGGCCGTGCATACCCGGGGTCTTGA |
| | | CTTCGCCTGCGATATCTACATTTGGGCCCCTCTGGCTGGTACT |
| | | TGCGGGGTCCTGCTGCTTTCACTCGTGATCACTCTTTACTGTA |
| | | AGCGCGGTCGGAAGAAGCTGCTGTACATCTTTAAGCAACCCT |
| | | TCATGAGGCCTGTGCAGACTACTCAAGAGGAGGACGGCTGTT |
| | | CATGCCGGTTCCCAGAGGAGGAGGAAGGCGGCTGCGAACTGC |
| | | GCGTGAAATTCAGCCGCAGCGCAGATGCTCCAGCCTACAAGC |
| | | AGGGGCAGAACCAGCTCTACAACGAACTCAATCTTGGTCGGA |
| | | GAGAGGAGTACGACGTGCTGGACAAGCGGAGAGGACGGGAC |
| | | CCAGAAATGGGCGGGAAGCCGCGCAGAAAGAATCCCCAAGA |
| | | GGGCCTGTACAACGAGCTCCAAAAGGATAAGATGGCAGAAG |
| | | CCTATAGCGAGATTGGTATGAAAGGGGAACGCAGAAGAGGC |
| | | AAAGGCCACGACGGACTGTACCAGGGACTCAGCACCGCCACC |
| | | AAGGACACCTATGACGCTCTTCACATGCAGGCCCTGCCGCCT |
| | | CGG |

BCMA_EBB-C1978-D10

| | | |
|---|---|---|
| BCMA_EBB- | 141 | EVQLVETGGGLVQPGRSLRLSCAASGFTFDDYAMHWVRQAPGK |
| C1978- | | GLEWVSGISWNSGSIGYADSVKGRFTISRDNAKNSLYLQMNSLR |
| D10 - aa | | DEDTAVYYCARVGKAVPDVWGQGTTVTVSSGGGGSGGGGSGG |
| ScFv | | GGSDIVMTQTPSSLSASVGDRVTITCRASQSISSYLNWYQQKPGK |
| domain | | APKLLIYAASSLQSGVPSRFSGSGSGTDFTLTISSLQPEDFATYYC |
| | | QQSYSTPYSFGQGTRLEIK |
| BCMA_EBB- | 162 | GAAGTGCAGCTCGTGGAAACTGGAGGTGGACTCGTGCAGCCT |
| C1978- | | GGACGGTCGCTGCGGCTGAGCTGCGCTGCATCCGGCTTCACC |
| D10- nt | | TTCGACGATTATGCCATGCACTGGGTCAGACAGGCGCCAGGG |
| ScFv | | AAGGGACTTGAGTGGGTGTCCGGTATCAGCTGGAATAGCGGC |
| domain | | TCAATCGGATACGCGGACTCCGTGAAGGGAAGGTTCACCATT |
| | | TCCCGCGACAACGCCAAGAACTCCCTGTACTTGCAAATGAAC |
| | | AGCCTCCGGGATGAGGACACTGCCGTGTACTACTGCGCCCGC |
| | | GTCGGAAAAGCTGTGCCCGACGTCTGGGGCCAGGGAACCACT |
| | | GTGACCGTGTCCAGCGGCGGGGGTGGATCGGGCGGTGGAGG |
| | | GTCCGGTGGAGGGGGCTCAGATATTGTGATGACCCAGACCCC |
| | | CTCGTCCCTGTCCGCCTCGGTCGGCGACCGCGTGACTATCACA |
| | | TGTAGAGCCTCGCAGAGCATCTCCAGCTACCTGAACTGGTAT |
| | | CAGCAGAAGCCGGGGAAGGCCCCGAAGCTCCTGATCTACGCG |
| | | GCATCATCACTGCAATCGGGAGTGCCGAGCCGGTTTTCCGGG |
| | | TCCGGCTCCGGCACCGACTTCACGCTGACCATTTCTTCCCTGC |
| | | AACCCGAGGACTTCGCCACTTACTACTGCCAGCAGTCCTACTC |
| | | CACCCCTTACTCCTTCGGCCAAGGAACCAGGCTGGAAATCAA |
| | | G |
| BCMA_EBB- | 183 | EVQLVETGGGLVQPGRSLRLSCAASGFTFDDYAMHWVRQAPGK |
| C1978- | | GLEWVSGISWNSGSIGYADSVKGRFTISRDNAKNSLYLQMNSLR |
| D10 - aa | | DEDTAVYYCARVGKAVPDVWGQGTTVTVSS |
| VH | | |
| BCMA_EBB- | 204 | DIVMTQTPSSLSASVGDRVTITCRASQSISSYLNWYQQKPGKAPK |
| C1978- | | LLIYAASSLQSGVPSRFSGSGSGTDFTLTISSLQPEDFATYYCQQS |
| D10- aa | | YSTPYSFGQGTRLEIK |
| VL | | |
| BCMA_EBB- | 225 | MALPVTALLLPLALLLHAARPEVQLVETGGGLVQPGRSLRLSCA |
| C1978- | | ASGFTFDDYAMHWVRQAPGKGLEWVSGISWNSGSIGYADSVK |
| D10 - aa | | GRFTISRDNAKNSLYLQMNSLRDEDTAVYYCARVGKAVPDVW |
| Full CART | | GQGTTVTVSSGGGGSGGGGSGGGGSDIVMTQTPSSLSASVGDRV |
| | | TITCRASQSISSYLNWYQQKPGKAPKLLIYAASSLQSGVPSRFSGS |
| | | GSGTDFTLTISSLQPEDFATYYCQQSYSTPYSFGQGTRLEIKTTTP |
| | | APRPPTPAPTIASQPLSLRPEACRPAAGGAVHTRGLDFACDIYIW |
| | | APLAGTCGVLLLSLVITLYCKRGRKKLLYIFKQPFMRPVQTTQEE |
| | | DGCSCRFPEEEEGGCELRVKFSRSADAPAYKQGQNQLYNELNLG |
| | | RREEYDVLDKRRGRDPEMGGKPRRKNPQEGLYNELQKDKMAE |
| | | AYSEIGMKGERRRGKGHDGLYQGLSTATKDTYDALHMQALPPR |
| BCMA_EBB- | 246 | ATGGCCCTCCCTGTCACCGCCCTGCTGCTTCCGCTGGCTCTTC |
| C1978- | | TGCTCCACGCCGCTCGGCCCGAAGTGCAGCTCGTGGAAACTG |
| D10 - nt | | GAGGTGGACTCGTGCAGCCTGGACGGTCGCTGCGGCTGAGCT |
| Full CART | | GCGCTGCATCCGGCTTCACCTTCGACGATTATGCCATGCACTG |
| | | GGTCAGACAGGCGCCAGGGAAGGGACTTGAGTGGGTGTCCG |
| | | GTATCAGCTGGAATAGCGGCTCAATCGGATACGCGGACTCCG |
| | | TGAAGGGAAGGTTCACCATTTCCCGCGACAACGCCAAGAACT |
| | | CCCTGTACTTGCAAATGAACAGCCTCCGGGATGAGGACACTG |
| | | CCGTGTACTACTGCGCCCGCGTCGGAAAAGCTGTGCCCGACG |
| | | TCTGGGGCCAGGGAACCACTGTGACCGTGTCCAGCGGCGGGG |
| | | GTGGATCGGGCGGTGGAGGGTCCGGTGGAGGGGGCTCAGAT |
| | | ATTGTGATGACCCAGACCCCCTCGTCCCTGTCCGCCTCGGTCG |
| | | GCGACCGCGTGACTATCACATGTAGAGCCTCGCAGAGCATCT |
| | | CCAGCTACCTGAACTGGTATCAGCAGAAGCCGGGGAAGGCCC |
| | | CGAAGCTCCTGATCTACGCGGCATCATCACTGCAATCGGGAG |
| | | TGCCGAGCCGGTTTTCCGGGTCCGGCTCCGGCACCGACTTCAC |
| | | GCTGACCATTTCTTCCCTGCAACCCGAGGACTTCGCCACTTAC |
| | | TACTGCCAGCAGTCCTACTCCACCCCTTACTCCTTCGGCCAAG |
| | | GAACCAGGCTGGAAATCAAGACCACTACCCCAGCACCGAGGC |
| | | CACCCACCCCGGCTCCTACCATCGCCTCCCAGCCTCTGTCCCT |
| | | GCGTCCGGAGGCATGTAGACCCGCAGCTGGTGGGGCCGTGCA |
| | | TACCCGGGGTCTTGACTTCGCCTGCGATATCTACATTTGGGCC |
| | | CCTCTGGCTGGTACTTGCGGGGTCCTGCTGCTTTCACTCGTGA |
| | | TCACTCTTTACTGTAAGCGCGGTCGGAAGAAGCTGCTGTACAT |
| | | CTTTAAGCAACCCTTCATGAGGCCTGTGCAGACTACTCAAGA |
| | | GGAGGACGGCTGTTCATGCCGGTTCCCAGAGGAGGAGGAAG |
| | | GCGGCTGCGAACTGCGCGTGAAATTCAGCCGCAGCGCAGATG |
| | | CTCCAGCCTACAAGCAGGGGCAGAACCAGCTCTACAACGAAC |
| | | TCAATCTTGGTCGGAGAGAGGAGTACGACGTGCTGGACAAGC |
| | | GGAGAGGACGGGACCCAGAAATGGGCGGGAAGCCGCGCAGA |
| | | AAGAATCCCCAAGAGGGCCTGTACAACGAGCTCCAAAAGGAT |
| | | AAGATGGCAGAAGCCTATAGCGAGATTGGTATGAAAGGGGA |
| | | ACGCAGAAGAGGCAAAGGCCACGACGGACTGTACCAGGGAC |
| | | TCAGCACCGCCACCAAGGACACCTATGACGCTCTTCACATGC |
| | | AGGCCCTGCCGCCTCGG |

BCMA_EBB-C1979-C12

| | | |
|---|---|---|
| BCMA_EBB- | 142 | EVQLVESGGGLVQPGRSLRLSCTASGFTFDDYAMHWVRQRPGK |
| C1979- | | GLEWVASINWKGNSLAYGDSVKGRFAISRDNAKNTVFLQMNSL |
| C12- aa | | RTEDTAVYYCASHQGVAYYNYAMDVWGRGTLVTVSSGGGGS |
| ScFv | | GGGGSGGGGSEIVLTQSPGTLSLSPGERATLSCRATQSIGSSFLA |
| domain | | WYQQRPGQAPRLLIYGASQRATGIPDRFSGRGSGTDFTLTISRVE |
| | | PEDSAVYYCQHYESSPSWTFGQGTKVEIK |
| BCMA_EBB- | 163 | GAAGTGCAGCTCGTGGAGAGCGGGGGAGGATTGGTGCAGCC |
| C1979- | | CGGAAGGTCCCTGCGGCTCTCCTGCACTGCGTCTGGCTTCACC |
| C12 - nt | | TTCGACGACTACGCGATGCACTGGGTCAGACAGCGCCCGGGA |
| ScFv | | AAGGGCCTGGAATGGGTCGCCTCAATCAACTGGAAGGGAAAC |
| domain | | TCCCTGGCCTATGGCGACAGCGTGAAGGGCCGCTTCGCCATTT |
| | | CGCGCGACAACGCCAAGAACACCGTGTTTCTGCAAATGAATT |
| | | CCCTGCGGACCGAGGATACCGCTGTGTACTACTGCGCCAGCC |
| | | ACCAGGGCGTGGCATACTATAACTACGCCATGGACGTGTGGG |
| | | GAAGAGGGACGCTCGTCACCGTGTCCTCCGGGGGCGGTGGAT |
| | | CGGGTGGAGGAGGAAGCGGTGGCGGGGGCAGCGAAATCGTG |
| | | CTGACTCAGAGCCCGGGAACTCTTTCACTGTCCCCGGGAGAA |
| | | CGGGCCACTCTCTCGTGCCGGGCCACCCAGTCCATCGGCTCCT |
| | | CCTTCCTTGCCTGGTACCAGCAGAGGCCAGGACAGGCGCCCC |
| | | GCCTGCTGATCTACGGTGCTTCCCAACGCGCCACTGGCATTCC |
| | | TGACCGGTTCAGCGGCAGAGGGTCGGGAACCGATTTCACACT |
| | | GACCATTTCCCGGGTGGAGCCCGAAGATTCGGCAGTCTACTA |
| | | CTGTCAGCATTACGAGTCCTCCCCTTCATGGACCTTCGGTCAA |
| | | GGGACCAAAGTGGAGATCAAG |
| BCMA_EBB- | 184 | EVQLVESGGGLVQPGRSLRLSCTASGFTFDDYAMHWVRQRPGK |
| C1979- | | GLEWVASINWKGNSLAYGDSVKGRFAISRDNAKNTVFLQMNSL |
| C12 - aa | | RTEDTAVYYCASHQGVAYYNYAMDVWGRGTLVTVSS |
| VH | | |
| BCMA_EBB- | 205 | EIVLTQSPGTLSLSPGERATLSCRATQSIGSSFLAWYQQRPGQAPR |
| C1979- | | LLIYGASQRATGIPDRFSGRGSGTDFTLTISRVEPEDSAVYYCQH |
| C12 - aa | | YESSPSWTFGQGTKVEIK |
| VL | | |
| BCMA_EBB- | 226 | MALPVTALLLPLALLLHAARPEVQLVESGGGLVQPGRSLRLSCT |
| C1979- | | ASGFTFDDYAMHWVRQRPGKGLEWVASINWKGNSLAYGDSVK |
| C12 - aa | | GRFAISRDNAKNTVFLQMNSLRTEDTAVYYCASHQGVAYYNYA |
| Full CART | | MDVWGRGTLVTVSSGGGGSGGGGSGGGGSEIVLTQSPGTLSLSP |
| | | GERATLSCRATQSIGSSFLAWYQQRPGQAPRLLIYGASQRATGIP |
| | | DRFSGRGSGTDFTLTISRVEPEDSAVYYCQHYESSPSWTFGQGTK |
| | | VEIKTTTPAPRPPTPAPTIASQPLSLRPEACRPAAGGAVHTRGLDF |
| | | ACDIYIWAPLAGTCGVLLLSLVITLYCKRGRKKLLYIFKQPFMRP |
| | | VQTTQEEDGCSCRFPEEEEGGCELRVKFSRSADAPAYKQGQNQL |
| | | YNELNLGRREEYDVLDKRRGRDPEMGGKPRRKNPQEGLYNELQ |
| | | KDKMAEAYSEIGMKGERRRGKGHDGLYQGLSTATKDTYDALH |
| | | MQALPPR |
| BCMA_EBB- | 247 | ATGGCCCTCCCTGTCACCGCCCTGCTGCTTCCGCTGGCTCTTC |
| C1979- | | TGCTCCACGCCGCTCGGCCCGAAGTGCAGCTCGTGGAGAGCG |
| C12 - nt | | GGGGAGGATTGGTGCAGCCCGGAAGGTCCCTGCGGCTCTCCT |
| Full CART | | GCACTGCGTCTGGCTTCACCTTCGACGACTACGCGATGCACTG |
| | | GGTCAGACAGCGCCCGGGAAAGGGCCTGGAATGGGTCGCCTC |
| | | AATCAACTGGAAGGGAAACTCCCTGGCCTATGGCGACAGCGT |
| | | GAAGGGCCGCTTCGCCATTTCGCGCGACAACGCCAAGAACAC |
| | | CGTGTTTCTGCAAATGAATTCCCTGCGGACCGAGGATACCGCT |
| | | GTGTACTACTGCGCCAGCCACCAGGGCGTGGCATACTATAAC |
| | | TACGCCATGGACGTGTGGGGAAGAGGGACGCTCGTCACCGTG |
| | | TCCTCCGGGGGCGGTGGATCGGGTGGAGGAGGAAGCGGTGG |
| | | CGGGGGCAGCGAAATCGTGCTGACTCAGAGCCCGGGAACTCT |
| | | TTCACTGTCCCCGGGAGAACGGGCCACTCTCTCGTGCCGGGC |
| | | CACCCAGTCCATCGGCTCCTCCTTCCTTGCCTGGTACCAGCAG |
| | | AGGCCAGGACAGGCGCCCCGCCTGCTGATCTACGGTGCTTCC |
| | | CAACGCGCCACTGGCATTCCTGACCGGTTCAGCGGCAGAGGG |
| | | TCGGGAACCGATTTCACACTGACCATTTCCCGGGTGGAGCCC |
| | | GAAGATTCGGCAGTCTACTACTGTCAGCATTACGAGTCCTCCC |
| | | CTTCATGGACCTTCGGTCAAGGGACCAAAGTGGAGATCAAGA |
| | | CCACTACCCCAGCACCGAGGCCACCCACCCCGGCTCCTACCA |
| | | TCGCCTCCCAGCCTCTGTCCCTGCGTCCGGAGGCATGTAGACC |
| | | CGCAGCTGGTGGGGCCGTGCATACCCGGGGTCTTGACTTCGC |
| | | CTGCGATATCTACATTTGGGCCCCTCTGGCTGGTACTTGCGGG |
| | | GTCCTGCTGCTTTCACTCGTGATCACTCTTTACTGTAAGCGCG |
| | | GTCGGAAGAAGCTGCTGTACATCTTTAAGCAACCCTTCATGA |
| | | GGCCTGTGCAGACTACTCAAGAGGAGGACGGCTGTTCATGCC |
| | | GGTTCCCAGAGGAGGAGGAAGGCGGCTGCGAACTGCGCGTG |
| | | AAATTCAGCCGCAGCGCAGATGCTCCAGCCTACAAGCAGGGG |
| | | CAGAACCAGCTCTACAACGAACTCAATCTTGGTCGGAGAGAG |
| | | GAGTACGACGTGCTGGACAAGCGGAGAGGACGGGACCCAGA |
| | | AATGGGCGGGAAGCCGCGCAGAAAGAATCCCCAAGAGGGCC |
| | | TGTACAACGAGCTCCAAAAGGATAAGATGGCAGAAGCCTATA |
| | | GCGAGATTGGTATGAAAGGGGAACGCAGAAGAGGCAAAGGC |
| | | CACGACGGACTGTACCAGGGACTCAGCACCGCCACCAAGGAC |
| | | ACCTATGACGCTCTTCACATGCAGGCCCTGCCGCCTCGG |

BCMA_EBB-C1980-G4

| | | |
|---|---|---|
| BCMA_EBB- | 143 | EVQLVESGGGLVQPGGSLRLSCAASGFTFSSYAMSWVRQAPGK |
| C1980- | | GLEWVSAISGSGGSTYYADSVKGRFTISRDNSKNTLYLQMNSLR |
| G4- aa | | AEDTAVYYCAKVVRDGMDVWGQGTTVTVSSGGGGSGGGGSG |
| ScFv | | GGGSEIVLTQSPATLSLSPGERATLSCRASQSVSSSYLAWYQQKP |
| domain | | GQAPRLLIYGASSRATGIPDRFSGNGSGTDFTLTISRLEPEDFAVY |
| | | YCQQYGSPPRFTFGPGTKVDIK |
| BCMA_EBB- | 2018 | GAGGTGCAGTTGGTCGAAAGCGGGGGCGGGCTTGTGCAGCCT |
| C1980- | | GGCGGATCACTGCGGCTGTCCTGCGCGGCATCAGGCTTCACG |
| G4- nt | | TTTTCTTCCTACGCCATGTCCTGGGTGCGCCAGGCCCCTGGAA |
| ScFv | | AGGGACTGGAATGGGTGTCCGCGATTTCGGGGTCCGGCGGGA |
| domain | | GCACCTACTACGCCGATTCCGTGAAGGGCCGCTTCACTATCTC |
| | | GCGGGACAACTCCAAGAACACCCTCTACCTCCAAATGAATAG |
| | | CCTGCGGGCCGAGGATACCGCCGTCTACTATTGCGCTAAGGT |
| | | CGTGCGCGACGGAATGGACGTGTGGGGACAGGGTACCACCGT |
| | | GACAGTGTCCTCGGGGGGAGGCGGTAGCGGCGGAGGAGGAA |
| | | GCGGTGGTGGAGGTTCCGAGATTGTGCTGACTCAATCACCCG |
| | | CGACCCTGAGCCTGTCCCCCGGCGAAAGGGCCACTCTGTCCT |
| | | GTCGGGCCAGCCAATCAGTCTCCTCCTCGTACCTGGCCTGGTA |
| | | CCAGCAGAAGCCAGGACAGGCTCCGAGACTCCTTATCTATGG |
| | | CGCATCCTCCCGCGCCACCGGAATCCCGGATAGGTTCTCGGG |
| | | AAACGGATCGGGGACCGACTTCACTCTCACCATCTCCCGGCT |
| | | GGAACCGGAGGACTTCGCCGTGTACTACTGCCAGCAGTACGG |
| | | CAGCCCGCCTAGATTCACTTTCGGCCCCGGCACCAAAGTGGA |
| | | CATCAAG |
| BCMA_EBB- | 185 | EVQLVESGGGLVQPGGSLRLSCAASGFTFSSYAMSWVRQAPGK |
| C1980- | | GLEWVSAISGSGGSTYYADSVKGRFTISRDNSKNTLYLQMNSLR |
| G4- aa | | AEDTAVYYCAKVVRDGMDVWGQGTTVTVSS |
| VH | | |
| BCMA_EBB- | 206 | EIVLTQSPATLSLSPGERATLSCRASQSVSSSYLAWYQQKPGQAP |
| C1980- | | RLLIYGASSRATGIPDRFSGNGSGTDFTLTISRLEPEDFAVYYCQQ |
| G4- aa | | YGSPPRFTFGPGTKVDIK |
| VL | | |
| BCMA_EBB- | 227 | MALPVTALLLPLALLLHAARPEVQLVESGGGLVQPGGSLRLSCA |
| C1980- | | ASGFTFSSYAMSWVRQAPGKGLEWVSAISGSGGSTYYADSVKG |
| G4- aa | | RFTISRDNSKNTLYLQMNSLRAEDTAVYYCAKVVRDGMDVWG |
| Full CART | | QGTTVTVSSGGGGSGGGGSGGGGSEIVLTQSPATLSLSPGERATL |
| | | SCRASQSVSSSYLAWYQQKPGQAPRLLIYGASSRATGIPDRFSGN |
| | | GSGTDFTLTISRLEPEDFAVYYCQQYGSPPRFTFGPGTKVDIKTTT |
| | | PAPRPPTPAPTIASQPLSLRPEACRPAAGGAVHTRGLDFACDIYIW |
| | | APLAGTCGVLLLSLVITLYCKRGRKKLLYIFKQPFMRPVQTTQEE |
| | | DGCSCRFPEEEEGGCELRVKFSRSADAPAYKQGQNQLYNELNLG |
| | | RREEYDVLDKRRGRDPEMGGKPRRKNPQEGLYNELQKDKMAE |
| | | AYSEIGMKGERRRGKGHDGLYQGLSTATKDTYDALHMQALPPR |
| BCMA_EBB- | 248 | ATGGCCCTCCCTGTCACCGCCCTGCTGCTTCCGCTGGCTCTTC |
| C1980- | | TGCTCCACGCCGCTCGGCCCGAGGTGCAGTTGGTCGAAAGCG |
| G4- nt | | GGGGCGGGCTTGTGCAGCCTGGCGGATCACTGCGGCTGTCCT |
| Full CART | | GCGCGGCATCAGGCTTCACGTTTTCTTCCTACGCCATGTCCTG |
| | | GGTGCGCCAGGCCCCTGGAAAGGGACTGGAATGGGTGTCCGC |
| | | GATTTCGGGGTCCGGCGGGAGCACCTACTACGCCGATTCCGT |
| | | GAAGGGCCGCTTCACTATCTCGCGGGACAACTCCAAGAACAC |
| | | CCTCTACCTCCAAATGAATAGCCTGCGGGCCGAGGATACCGC |
| | | CGTCTACTATTGCGCTAAGGTCGTGCGCGACGGAATGGACGT |
| | | GTGGGGACAGGGTACCACCGTGACAGTGTCCTCGGGGGGAGG |
| | | CGGTAGCGGCGGAGGAGGAAGCGGTGGTGGAGGTTCCGAGA |
| | | TTGTGCTGACTCAATCACCCGCGACCCTGAGCCTGTCCCCCGG |
| | | CGAAAGGGCCACTCTGTCCTGTCGGGCCAGCCAATCAGTCTC |
| | | CTCCTCGTACCTGGCCTGGTACCAGCAGAAGCCAGGACAGGC |
| | | TCCGAGACTCCTTATCTATGGCGCATCCTCCCGCGCCACCGGA |
| | | ATCCCGGATAGGTTCTCGGGAAACGGATCGGGGACCGACTTC |
| | | ACTCTCACCATCTCCCGGCTGGAACCGGAGGACTTCGCCGTGT |
| | | ACTACTGCCAGCAGTACGGCAGCCCGCCTAGATTCACTTTCG |
| | | GCCCCGGCACCAAAGTGGACATCAAGACCACTACCCCAGCAC |
| | | CGAGGCCACCCACCCCGGCTCCTACCATCGCCTCCCAGCCTCT |
| | | GTCCCTGCGTCCGGAGGCATGTAGACCCGCAGCTGGTGGGGC |
| | | CGTGCATACCCGGGGTCTTGACTTCGCCTGCGATATCTACATT |
| | | TGGGCCCCTCTGGCTGGTACTTGCGGGGTCCTGCTGCTTTCAC |
| | | TCGTGATCACTCTTTACTGTAAGCGCGGTCGGAAGAAGCTGCT |
| | | GTACATCTTTAAGCAACCCTTCATGAGGCCTGTGCAGACTACT |
| | | CAAGAGGAGGACGGCTGTTCATGCCGGTTCCCAGAGGAGGAG |
| | | GAAGGCGGCTGCGAACTGCGCGTGAAATTCAGCCGCAGCGCA |
| | | GATGCTCCAGCCTACAAGCAGGGGCAGAACCAGCTCTACAAC |
| | | GAACTCAATCTTGGTCGGAGAGAGGAGTACGACGTGCTGGAC |
| | | AAGCGGAGAGGACGGGACCCAGAAATGGGCGGGAAGCCGCG |
| | | CAGAAAGAATCCCCAAGAGGGCCTGTACAACGAGCTCCAAA |
| | | AGGATAAGATGGCAGAAGCCTATAGCGAGATTGGTATGAAA |
| | | GGGGAACGCAGAAGAGGCAAAGGCCACGACGGACTGTACCA |
| | | GGGACTCAGCACCGCCACCAAGGACACCTATGACGCTCTTCA |
| | | CATGCAGGCCCTGCCGCCTCGG |

BCMA_EBB-C1980-D2

| | | |
|---|---|---|
| BCMA_EBB- | 144 | EVQLLESGGGLVQPGGSLRLSCAASGFTFSSYAMSWVRQAPGK |
| C1980- | | GLEWVSAISGSGGSTYYADSVKGRFTISRDNSKNTLYLQMNSLR |
| D2- aa | | AEDTAVYYCAKIPQTGTFDYWGQGTLVTVSSGGGGSGGGGSGG |
| ScFv | | GGSEIVLTQSPGTLSLSPGERATLSCRASQSVSSSYLAWYQQRPG |
| domain | | QAPRLLIYGASSRATGIPDRFSGSGSGTDFTLTISRLEPEDFAVYY |
| | | CQHYGSSPSWTFGQGTRLEIK |
| BCMA_EBB- | 165 | GAAGTGCAGCTGCTGGAGTCCGGCGGTGGATTGGTGCAACCG |
| C1980- | | GGGGGATCGCTCAGACTGTCCTGTGCGGCGTCAGGCTTCACC |
| D2- nt | | TTCTCGAGCTACGCCATGTCATGGGTCAGACAGGCCCCTGGA |
| ScFv | | AAGGGTCTGGAATGGGTGTCCGCCATTTCCGGGAGCGGGGGA |
| domain | | TCTACATACTACGCCGATAGCGTGAAGGGCCGCTTCACCATTT |
| | | CCCGGGACAACTCCAAGAACACTCTCTATCTGCAAATGAACT |
| | | CCCTCCGCGCTGAGGACACTGCCGTGTACTACTGCGCCAAAA |
| | | TCCCTCAGACCGGCACCTTCGACTACTGGGGACAGGGGACTC |
| | | TGGTCACCGTCAGCAGCGGTGGCGGAGGTTCGGGGGGAGGA |
| | | GGAAGCGGCGGCGGAGGGTCCGAGATTGTGCTGACCCAGTCA |
| | | CCCGGCACTTTGTCCCTGTCGCCTGGAGAAAGGGCCACCCTTT |
| | | CCTGCCGGGCATCCCAATCCGTGTCCTCCTCGTACCTGGCCTG |
| | | GTACCAGCAGAGGCCCGGACAGGCCCCACGGCTTCTGATCTA |
| | | CGGAGCAAGCAGCCGCGCGACCGGTATCCCGGACCGGTTTTC |
| | | GGGCTCGGGCTCAGGAACTGACTTCACCCTCACCATCTCCCGC |
| | | CTGGAACCCGAAGATTTCGCTGTGTATTACTGCCAGCACTACG |
| | | GCAGCTCCCCGTCCTGGACGTTCGGCCAGGGAACTCGGCTGG |
| | | AGATCAAG |
| BCMA_EBB- | 186 | EVQLLESGGGLVQPGGSLRLSCAASGFTFSSYAMSWVRQAPGK |
| C1980- | | GLEWVSAISGSGGSTYYADSVKGRFTISRDNSKNTLYLQMNSLR |
| D2- aa | | AEDTAVYYCAKIPQTGTFDYWGQGTLVTVSS |
| VH | | |
| BCMA_EBB- | 207 | EIVLTQSPGTLSLSPGERATLSCRASQSVSSSYLAWYQQRPGQAP |
| C1980- | | RLLIYGASSRATGIPDRFSGSGSGTDFTLTISRLEPEDFAVYYCQH |
| D2- aa | | YGSSPSWTFGQGTRLEIK |
| VL | | |
| BCMA_EBB- | 228 | MALPVTALLLPLALLLHAARPEVQLLESGGGLVQPGGSLRLSCA |
| C1980- | | ASGFTFSSYAMSWVRQAPGKGLEWVSAISGSGGSTYYADSVKG |
| D2- aa | | RFTISRDNSKNTLYLQMNSLRAEDTAVYYCAKIPQTGTFDYWGQ |
| Full CART | | GTLVTVSSGGGGSGGGGSGGGGSEIVLTQSPGTLSLSPGERATLS |
| | | CRASQSVSSSYLAWYQQRPGQAPRLLIYGASSRATGIPDRFSGSG |
| | | SGTDFTLTISRLEPEDFAVYYCQHYGSSPSWTFGQGTRLEIKTTTP |
| | | APRPPTPAPTIASQPLSLRPEACRPAAGGAVHTRGLDFACDIYIW |
| | | APLAGTCGVLLLSLVITLYCKRGRKKLLYIFKQPFMRPVQTTQEE |
| | | DGCSCRFPEEEEGGCELRVKFSRSADAPAYKQGQNQLYNELNLG |
| | | RREEYDVLDKRRGRDPEMGGKPRRKNPQEGLYNELQKDKMAE |
| | | AYSEIGMKGERRRGKGHDGLYQGLSTATKDTYDALHMQALPPR |
| BCMA_EBB- | 249 | ATGGCCCTCCCTGTCACCGCCCTGCTGCTTCCGCTGGCTCTTC |
| C1980- | | TGCTCCACGCCGCTCGGCCCGAAGTGCAGCTGCTGGAGTCCG |
| D2- nt | | GCGGTGGATTGGTGCAACCGGGGGGATCGCTCAGACTGTCCT |
| Full CART | | GTGCGGCGTCAGGCTTCACCTTCTCGAGCTACGCCATGTCATG |
| | | GGTCAGACAGGCCCCTGGAAAGGGTCTGGAATGGGTGTCCGC |
| | | CATTTCCGGGAGCGGGGGATCTACATACTACGCCGATAGCGT |
| | | GAAGGGCCGCTTCACCATTTCCCGGGACAACTCCAAGAACAC |
| | | TCTCTATCTGCAAATGAACTCCCTCCGCGCTGAGGACACTGCC |
| | | GTGTACTACTGCGCCAAAATCCCTCAGACCGGCACCTTCGACT |
| | | ACTGGGGACAGGGGACTCTGGTCACCGTCAGCAGCGGTGGCG |
| | | GAGGTTCGGGGGGAGGAGGAAGCGGCGGCGGAGGGTCCGAG |
| | | ATTGTGCTGACCCAGTCACCCGGCACTTTGTCCCTGTCGCCTG |
| | | GAGAAAGGGCCACCCTTTCCTGCCGGGCATCCCAATCCGTGT |
| | | CCTCCTCGTACCTGGCCTGGTACCAGCAGAGGCCCGGACAGG |
| | | CCCCACGGCTTCTGATCTACGGAGCAAGCAGCCGCGCGACCG |
| | | GTATCCCGGACCGGTTTTCGGGCTCGGGCTCAGGAACTGACTT |
| | | CACCCTCACCATCTCCCGCCTGGAACCCGAAGATTTCGCTGTG |
| | | TATTACTGCCAGCACTACGGCAGCTCCCCGTCCTGGACGTTCG |
| | | GCCAGGGAACTCGGCTGGAGATCAAGACCACTACCCCAGCAC |
| | | CGAGGCCACCCACCCCGGCTCCTACCATCGCCTCCCAGCCTCT |
| | | GTCCCTGCGTCCGGAGGCATGTAGACCCGCAGCTGGTGGGGC |
| | | CGTGCATACCCGGGGTCTTGACTTCGCCTGCGATATCTACATT |
| | | TGGGCCCCTCTGGCTGGTACTTGCGGGGTCCTGCTGCTTTCAC |
| | | TCGTGATCACTCTTTACTGTAAGCGCGGTCGGAAGAAGCTGCT |
| | | GTACATCTTTAAGCAACCCTTCATGAGGCCTGTGCAGACTACT |
| | | CAAGAGGAGGACGGCTGTTCATGCCGGTTCCCAGAGGAGGAG |
| | | GAAGGCGGCTGCGAACTGCGCGTGAAATTCAGCCGCAGCGCA |
| | | GATGCTCCAGCCTACAAGCAGGGGCAGAACCAGCTCTACAAC |
| | | GAACTCAATCTTGGTCGGAGAGAGGAGTACGACGTGCTGGAC |
| | | AAGCGGAGAGGACGGGACCCAGAAATGGGCGGGAAGCCGCG |
| | | CAGAAAGAATCCCCAAGAGGGCCTGTACAACGAGCTCCAAA |
| | | AGGATAAGATGGCAGAAGCCTATAGCGAGATTGGTATGAAA |
| | | GGGGAACGCAGAAGAGGCAAAGGCCACGACGGACTGTACCA |
| | | GGGACTCAGCACCGCCACCAAGGACACCTATGACGCTCTTCA |
| | | CATGCAGGCCCTGCCGCCTCGG |

BCMA_EBB-C1978-A10

| | | |
|---|---|---|
| BCMA_EBB- | 145 | EVQLVETGGGLVQPGGSLRLSCAASGFTFSSYAMSWVRQAPGK |
| C1978- | | GLEWVSAISGSGGSTYYADSVKGRFTMSRENDKNSVFLQMNSL |
| A10- aa | | RVEDTGVYYCARANYKRELRYYYGMDVWGQGTMVTVSSGGG |
| ScFv | | GSGGGGSGGGGSEIVMTQSPGTLSLSPGESATLSCRASQRVASN |
| domain | | YLAWYQHKPGQAPSLLISGASSRATGVPDRFSGSGSGTDFTLAIS |
| | | RLEPEDSAVYYCQHYDSSPSWTFGQGTKVEIK |
| BCMA_EBB- | 166 | GAAGTGCAACTGGTGGAAACCGGTGGAGGACTCGTGCAGCCT |
| C1978- | | GGCGGCAGCCTCCGGCTGAGCTGCGCCGCTTCGGGATTCACC |
| A10- nt | | TTTTCCTCCTACGCGATGTCTTGGGTCAGACAGGCCCCCGGAA |
| ScFv | | AGGGGCTGGAATGGGTGTCAGCCATCTCCGGCTCCGGCGGAT |
| domain | | CAACGTACTACGCCGACTCCGTGAAAGGCCGGTTCACCATGT |
| | | CGCGCGAGAATGACAAGAACTCCGTGTTCCTGCAAATGAACT |
| | | CCCTGAGGGTGGAGGACACCGGAGTGTACTATTGTGCGCGCG |
| | | CCAACTACAAGAGAGAGCTGCGGTACTACTACGGAATGGACG |
| | | TCTGGGGACAGGGAACTATGGTGACCGTGTCATCCGGTGGAG |
| | | GGGGAAGCGGCGGTGGAGGCAGCGGGGGCGGGGGTTCAGAA |
| | | ATTGTCATGACCCAGTCCCCGGGAACTCTTTCCCTCTCCCCCG |
| | | GGGAATCCGCGACTTTGTCCTGCCGGGCCAGCCAGCGCGTGG |
| | | CCTCGAACTACCTCGCATGGTACCAGCATAAGCCAGGCCAAG |
| | | CCCCTTCCCTGCTGATTTCCGGGGCTAGCAGCCGCGCCACTGG |
| | | CGTGCCGGATAGGTTCTCGGGAAGCGGCTCGGGTACCGATTT |
| | | CACCCTGGCAATCTCGCGGCTGGAACCGGAGGATTCGGCCGT |
| | | GTACTACTGCCAGCACTATGACTCATCCCCCTCCTGGACATTC |
| | | GGACAGGGCACCAAGGTCGAGATCAAG |
| BCMA_EBB- | 187 | EVQLVETGGGLVQPGGSLRLSCAASGFTFSSYAMSWVRQAPGK |
| C1978- | | GLEWVSAISGSGGSTYYADSVKGRFTMSRENDKNSVFLQMNSL |
| A10- aa | | RVEDTGVYYCARANYKRELRYYYGMDVWGQGTMVTVSS |
| VH | | |
| BCMA_EBB- | 208 | EIVMTQSPGTLSLSPGESATLSCRASQRVASNYLAWYQHKPGQA |
| C1978- | | PSLLISGASSRATGVPDRFSGSGSGTDFTLAISRLEPEDSAVYYCQ |
| A10- aa | | HYDSSPSWTFGQGTKVEIK |
| VL | | |
| BCMA_EBB- | 229 | MALPVTALLLPLALLLHAARPEVQLVETGGGLVQPGGSLRLSCA |
| C1978- | | ASGFTFSSYAMSWVRQAPGKGLEWVSAISGSGGSTYYADSVKG |
| A10- aa | | RFTMSRENDKNSVFLQMNSLRVEDTGVYYCARANYKRELRYY |
| Full CART | | YGMDVWGQGTMVTVSSGGGGSGGGGSGGGGSEIVMTQSPGTL |
| | | SLSPGESATLSCRASQRVASNYLAWYQHKPGQAPSLLISGASSRA |
| | | TGVPDRFSGSGSGTDFTLAISRLEPEDSAVYYCQHYDSSPSWTFG |
| | | QGTKVEIKTTTPAPRPPTPAPTIASQPLSLRPEACRPAAGGAVHTR |
| | | GLDFACDIYIWAPLAGTCGVLLLSLVITLYCKRGRKKLLYIFKQP |
| | | FMRPVQTTQEEDGCSCRFPEEEEGGCELRVKFSRSADAPAYKQG |
| | | QNQLYNELNLGRREEYDVLDKRRGRDPEMGGKPRRKNPQEGL |
| | | YNELQKDKMAEAYSEIGMKGERRRGKGHDGLYQGLSTATKDT |
| | | YDALHMQALPPR |
| BCMA_EBB- | 250 | ATGGCCCTCCCTGTCACCGCCCTGCTGCTTCCGCTGGCTCTTC |
| C1978- | | TGCTCCACGCCGCTCGGCCCGAAGTGCAACTGGTGGAAACCG |
| A10- nt | | GTGGAGGACTCGTGCAGCCTGGCGGCAGCCTCCGGCTGAGCT |
| Full CART | | GCGCCGCTTCGGGATTCACCTTTTCCTCCTACGCGATGTCTTG |
| | | GGTCAGACAGGCCCCCGGAAAGGGGCTGGAATGGGTGTCAG |
| | | CCATCTCCGGCTCCGGCGGATCAACGTACTACGCCGACTCCGT |
| | | GAAAGGCCGGTTCACCATGTCGCGCGAGAATGACAAGAACTC |
| | | CGTGTTCCTGCAAATGAACTCCCTGAGGGTGGAGGACACCGG |
| | | AGTGTACTATTGTGCGCGCGCCAACTACAAGAGAGAGCTGCG |
| | | GTACTACTACGGAATGGACGTCTGGGGACAGGGAACTATGGT |
| | | GACCGTGTCATCCGGTGGAGGGGGAAGCGGCGGTGGAGGCA |
| | | GCGGGGGCGGGGGTTCAGAAATTGTCATGACCCAGTCCCCGG |
| | | GAACTCTTTCCCTCTCCCCCGGGGAATCCGCGACTTTGTCCTG |
| | | CCGGGCCAGCCAGCGCGTGGCCTCGAACTACCTCGCATGGTA |
| | | CCAGCATAAGCCAGGCCAAGCCCCTTCCCTGCTGATTTCCGG |
| | | GGCTAGCAGCCGCGCCACTGGCGTGCCGGATAGGTTCTCGGG |
| | | AAGCGGCTCGGGTACCGATTTCACCCTGGCAATCTCGCGGCT |
| | | GGAACCGGAGGATTCGGCCGTGTACTACTGCCAGCACTATGA |
| | | CTCATCCCCCTCCTGGACATTCGGACAGGGCACCAAGGTCGA |
| | | GATCAAGACCACTACCCCAGCACCGAGGCCACCCACCCCGGC |
| | | TCCTACCATCGCCTCCCAGCCTCTGTCCCTGCGTCCGGAGGCA |
| | | TGTAGACCCGCAGCTGGTGGGGCCGTGCATACCCGGGGTCTT |
| | | GACTTCGCCTGCGATATCTACATTTGGGCCCCTCTGGCTGGTA |
| | | CTTGCGGGGTCCTGCTGCTTTCACTCGTGATCACTCTTTACTGT |
| | | AAGCGCGGTCGGAAGAAGCTGCTGTACATCTTTAAGCAACCC |
| | | TTCATGAGGCCTGTGCAGACTACTCAAGAGGAGGACGGCTGT |
| | | TCATGCCGGTTCCCAGAGGAGGAGGAAGGCGGCTGCGAACTG |
| | | CGCGTGAAATTCAGCCGCAGCGCAGATGCTCCAGCCTACAAG |
| | | CAGGGGCAGAACCAGCTCTACAACGAACTCAATCTTGGTCGG |
| | | AGAGAGGAGTACGACGTGCTGGACAAGCGGAGAGGACGGGA |
| | | CCCAGAAATGGGCGGGAAGCCGCGCAGAAAGAATCCCCAAG |
| | | AGGGCCTGTACAACGAGCTCCAAAAGGATAAGATGGCAGAA |
| | | GCCTATAGCGAGATTGGTATGAAAGGGGAACGCAGAAGAGG |
| | | CAAAGGCCACGACGGACTGTACCAGGGACTCAGCACCGCCAC |
| | | CAAGGACACCTATGACGCTCTTCACATGCAGGCCCTGCCGCC |
| | | TCGG |

BCMA_EBB-C1978-D4

| | | |
|---|---|---|
| BCMA_EBB- | 146 | EVQLLETGGGLVQPGGSLRLSCAASGFSFSSYAMSWVRQAPGK |
| C1978- | | GLEWVSAISGSGGSTYYADSVKGRFTISRDNSKNTLYLQMNSLR |
| D4- aa | | AEDTAVYYCAKALVGATGAFDIWGQGTLVTVSSGGGGSGGGG |
| ScFv | | SGGGGSEIVLTQSPGTLSLSPGERATLSCRASQSLSSNFLAWYQQ |
| domain | | KPGQAPGLLIYGASNWATGTPDRFSGSGSGTDFTLTITRLEPEDF |
| | | AVYYCQYYGTSPMYTFGQGTKVEIK |
| BCMA_EBB- | 167 | GAAGTGCAGCTGCTCGAAACCGGTGGAGGGCTGGTGCAGCCA |
| C1978- | | GGGGGCTCCCTGAGGCTTTCATGCGCCGCTAGCGGATTCTCCT |
| D4- nt | | TCTCCTCTTACGCCATGTCGTGGGTCCGCCAAGCCCCTGGAAA |
| ScFv | | AGGCCTGGAATGGGTGTCCGCGATTTCCGGGAGCGGAGGTTC |
| domain | | GACCTATTACGCCGACTCCGTGAAGGGCCGCTTTACCATCTCC |
| | | CGGGATAACTCCAAGAACACTCTGTACCTCCAAATGAACTCG |
| | | CTGAGAGCCGAGGACACCGCCGTGTATTACTGCGCGAAGGCG |
| | | CTGGTCGGCGCGACTGGGGCATTCGACATCTGGGGACAGGGA |
| | | ACTCTTGTGACCGTGTCGAGCGGAGGCGGCGGCTCCGGCGGA |
| | | GGAGGGAGCGGGGGCGGTGGTTCCGAAATCGTGTTGACTCAG |
| | | TCCCCGGGAACCCTGAGCTTGTCACCCGGGGAGCGGGCCACT |
| | | CTCTCCTGTCGCGCCTCCCAATCGCTCTCATCCAATTTCCTGG |
| | | CCTGGTACCAGCAGAAGCCCGGACAGGCCCCGGGCCTGCTCA |
| | | TCTACGGCGCTTCAAACTGGGCAACGGGAACCCCTGATCGGT |
| | | TCAGCGGAAGCGGATCGGGTACTGACTTTACCCTGACCATCA |
| | | CCAGACTGGAACCGGAGGACTTCGCCGTGTACTACTGCCAGT |
| | | ACTACGGCACCTCCCCCATGTACACATTCGGACAGGGTACCA |
| | | AGGTCGAGATTAAG |
| BCMA_EBB- | 188 | EVQLLETGGGLVQPGGSLRLSCAASGFSFSSYAMSWVRQAPGK |
| C1978- | | GLEWVSAISGSGGSTYYADSVKGRFTISRDNSKNTLYLQMNSLR |
| D4- aa | | AEDTAVYYCAKALVGATGAFDIWGQGTLVTVSS |
| VH | | |
| BCMA_EBB- | 209 | EIVLTQSPGTLSLSPGERATLSCRASQSLSSNFLAWYQQKPGQAP |
| C1978- | | GLLIYGASNWATGTPDRFSGSGSGTDFTLTITRLEPEDFAVYYCQ |
| D4- aa | | YYGTSPMYTFGQGTKVEIK |
| VL | | |
| BCMA_EBB- | 230 | MALPVTALLLPLALLLHAARPEVQLLETGGGLVQPGGSLRLSCA |
| C1978- | | ASGFSFSSYAMSWVRQAPGKGLEWVSAISGSGGSTYYADSVKG |
| D4- aa | | RFTISRDNSKNTLYLQMNSLRAEDTAVYYCAKALVGATGAFDI |
| Full CART | | WGQGTLVTVSSGGGGSGGGGSGGGGSEIVLTQSPGTLSLSPGER |
| | | ATLSCRASQSLSSNFLAWYQQKPGQAPGLLIYGASNWATGTPDR |
| | | FSGSGSGTDFTLTITRLEPEDFAVYYCQYYGTSPMYTFGQGTKVE |
| | | IKTTTPAPRPPTPAPTIASQPLSLRPEACRPAAGGAVHTRGLDFAC |
| | | DIYIWAPLAGTCGVLLLSLVITLYCKRGRKKLLYIFKQPFMRPVQ |
| | | TTQEEDGCSCRFPEEEEGGCELRVKFSRSADAPAYKQGQNQLYN |
| | | ELNLGRREEYDVLDKRRGRDPEMGGKPRRKNPQEGLYNELQKD |
| | | KMAEAYSEIGMKGERRRGKGHDGLYQGLSTATKDTYDALHMQ |
| | | ALPPR |
| BCMA_EBB- | 251 | ATGGCCCTCCCTGTCACCGCCCTGCTGCTTCCGCTGGCTCTTC |
| C1978- | | TGCTCCACGCCGCTCGGCCCGAAGTGCAGCTGCTCGAAACCG |
| D4- nt | | GTGGAGGGCTGGTGCAGCCAGGGGGCTCCCTGAGGCTTTCAT |
| Full CART | | GCGCCGCTAGCGGATTCTCCTTCTCCTCTTACGCCATGTCGTG |
| | | GGTCCGCCAAGCCCCTGGAAAAGGCCTGGAATGGGTGTCCGC |
| | | GATTTCCGGGAGCGGAGGTTCGACCTATTACGCCGACTCCGT |
| | | GAAGGGCCGCTTTACCATCTCCCGGGATAACTCCAAGAACAC |
| | | TCTGTACCTCCAAATGAACTCGCTGAGAGCCGAGGACACCGC |
| | | CGTGTATTACTGCGCGAAGGCGCTGGTCGGCGCGACTGGGGC |
| | | ATTCGACATCTGGGGACAGGGAACTCTTGTGACCGTGTCGAG |
| | | CGGAGGCGGCGGCTCCGGCGGAGGAGGGAGCGGGGGCGGTG |
| | | GTTCCGAAATCGTGTTGACTCAGTCCCCGGGAACCCTGAGCTT |
| | | GTCACCCGGGGAGCGGGCCACTCTCTCCTGTCGCGCCTCCCA |
| | | ATCGCTCTCATCCAATTTCCTGGCCTGGTACCAGCAGAAGCCC |
| | | GGACAGGCCCCGGGCCTGCTCATCTACGGCGCTTCAAACTGG |
| | | GCAACGGGAACCCCTGATCGGTTCAGCGGAAGCGGATCGGGT |
| | | ACTGACTTTACCCTGACCATCACCAGACTGGAACCGGAGGAC |
| | | TTCGCCGTGTACTACTGCCAGTACTACGGCACCTCCCCCATGT |
| | | ACACATTCGGACAGGGTACCAAGGTCGAGATTAAGACCACTA |
| | | CCCCAGCACCGAGGCCACCCACCCCGGCTCCTACCATCGCCT |
| | | CCCAGCCTCTGTCCCTGCGTCCGGAGGCATGTAGACCCGCAG |
| | | CTGGTGGGGCCGTGCATACCCGGGGTCTTGACTTCGCCTGCG |
| | | ATATCTACATTTGGGCCCCTCTGGCTGGTACTTGCGGGGTCCT |
| | | GCTGCTTTCACTCGTGATCACTCTTTACTGTAAGCGCGGTCGG |
| | | AAGAAGCTGCTGTACATCTTTAAGCAACCCTTCATGAGGCCT |
| | | GTGCAGACTACTCAAGAGGAGGACGGCTGTTCATGCCGGTTC |
| | | CCAGAGGAGGAGGAAGGCGGCTGCGAACTGCGCGTGAAATT |
| | | CAGCCGCAGCGCAGATGCTCCAGCCTACAAGCAGGGGCAGA |
| | | ACCAGCTCTACAACGAACTCAATCTTGGTCGGAGAGAGGAGT |
| | | ACGACGTGCTGGACAAGCGGAGAGGACGGGACCCAGAAATG |
| | | GGCGGGAAGCCGCGCAGAAAGAATCCCCAAGAGGGCCTGTA |
| | | CAACGAGCTCCAAAAGGATAAGATGGCAGAAGCCTATAGCG |
| | | AGATTGGTATGAAAGGGGAACGCAGAAGAGGCAAAGGCCAC |
| | | GACGGACTGTACCAGGGACTCAGCACCGCCACCAAGGACACC |
| | | TATGACGCTCTTCACATGCAGGCCCTGCCGCCTCGG |

BCMA_EBB-C1980-A2

| | | |
|---|---|---|
| BCMA_EBB- | 147 | EVQLLESGGGLVQPGGSLRLSCAASGFTFSSYAMSWVRQAPGK |
| C1980- | | GLEWVSAISGSGGSTYYADSVKGRFTISRDNSKNTLYLQMNSLR |
| A2- aa | | AEDTAVYYCVLWFGEGFDPWGQGTLVTVSSGGGGSGGGGSGG |
| ScFv | | GGSDIVLTQSPLSLPVTPGEPASISCRSSQSLLHSNGYNYLDWYL |
| domain | | QKPGQSPQLLIYLGSNRASGVPDRFSGSGSGTDFTLKISRVEAED |
| | | VGVYYCMQALQTPLTFGGGTKVDIK |
| BCMA_EBB- | 168 | GAAGTGCAGCTGCTTGAGAGCGGTGGAGGTCTGGTGCAGCCC |
| C1980- | | GGGGGATCACTGCGCCTGTCCTGTGCCGCGTCCGGTTTCACTT |
| A2- nt | | TCTCCTCGTACGCCATGTCGTGGGTCAGACAGGCACCGGGAA |
| ScFv | | AGGGACTGGAATGGGTGTCAGCCATTTCGGGTTCGGGGGGCA |
| domain | | GCACCTACTACGCTGACTCCGTGAAGGGCCGGTTCACCATTTC |
| | | CCGCGACAACTCCAAGAACACCTTGTACCTCCAAATGAACTC |
| | | CCTGCGGGCCGAAGATACCGCCGTGTATTACTGCGTGCTGTG |
| | | GTTCGGAGAGGGATTCGACCCGTGGGGACAAGGAACACTCGT |
| | | GACTGTGTCATCCGGCGGAGGCGGCAGCGGTGGCGGCGGTTC |
| | | CGGCGGCGGCGGATCTGACATCGTGTTGACCCAGTCCCCTCT |
| | | GAGCCTGCCGGTCACTCCTGGCGAACCAGCCAGCATCTCCTG |
| | | CCGGTCGAGCCAGTCCCTCCTGCACTCCAATGGGTACAACTA |
| | | CCTCGATTGGTATCTGCAAAAGCCGGGCCAGAGCCCCCAGCT |
| | | GCTGATCTACCTTGGGTCAAACCGCGCTTCCGGGGTGCCTGAT |
| | | AGATTCTCCGGGTCCGGGAGCGGAACCGACTTTACCCTGAAA |
| | | ATCTCGAGGGTGGAGGCCGAGGACGTCGGAGTGTACTACTGC |
| | | ATGCAGGCGCTCCAGACTCCCCTGACCTTCGGAGGAGGAACG |
| | | AAGGTCGACATCAAGA |
| BCMA_EBB- | 189 | EVQLLESGGGLVQPGGSLRLSCAASGFTFSSYAMSWVRQAPGK |
| C1980- | | GLEWVSAISGSGGSTYYADSVKGRFTISRDNSKNTLYLQMNSLR |
| A2- aa | | AEDTAVYYCVLWFGEGFDPWGQGTLVTVSS |
| VH | | |
| BCMA_EBB- | 210 | DIVLTQSPLSLPVTPGEPASISCRSSQSLLHSNGYNYLDWYLQKP |
| C1980- | | GQSPQLLIYLGSNRASGVPDRFSGSGSGTDFTLKISRVEAEDVGV |
| A2- aa | | YYCMQALQTPLTFGGGTKVDIK |
| VL | | |
| BCMA_EBB- | 231 | MALPVTALLLPLALLLHAARPEVQLLESGGGLVQPGGSLRLSCA |
| C1980- | | ASGFTFSSYAMSWVRQAPGKGLEWVSAISGSGGSTYYADSVKG |
| A2- aa | | RFTISRDNSKNTLYLQMNSLRAEDTAVYYCVLWFGEGFDPWGQ |
| Full CART | | GTLVTVSSGGGGSGGGGSGGGGSDIVLTQSPLSLPVTPGEPASIS |
| | | CRSSQSLLHSNGYNYLDWYLQKPGQSPQLLIYLGSNRASGVPDR |
| | | FSGSGSGTDFTLKISRVEAEDVGVYYCMQALQTPLTFGGGTKVD |
| | | IKTTTPAPRPPTPAPTIASQPLSLRPEACRPAAGGAVHTRGLDFAC |
| | | DIYIWAPLAGTCGVLLLSLVITLYCKRGRKKLLYIFKQPFMRPVQ |
| | | TTQEEDGCSCRFPEEEEGGCELRVKFSRSADAPAYKQGQNQLYN |
| | | ELNLGRREEYDVLDKRRGRDPEMGGKPRRKNPQEGLYNELQKD |
| | | KMAEAYSEIGMKGERRRGKGHDGLYQGLSTATKDTYDALHMQ |
| | | ALPPR |
| BCMA_EBB- | 252 | ATGGCCCTCCCTGTCACCGCCCTGCTGCTTCCGCTGGCTCTTC |
| C1980- | | TGCTCCACGCCGCTCGGCCCGAAGTGCAGCTGCTTGAGAGCG |
| A2- nt | | GTGGAGGTCTGGTGCAGCCCGGGGGATCACTGCGCCTGTCCT |
| Full CART | | GTGCCGCGTCCGGTTTCACTTTCTCCTCGTACGCCATGTCGTG |
| | | GGTCAGACAGGCACCGGGAAAGGGACTGGAATGGGTGTCAG |
| | | CCATTTCGGGTTCGGGGGGCAGCACCTACTACGCTGACTCCGT |
| | | GAAGGGCCGGTTCACCATTTCCCGCGACAACTCCAAGAACAC |
| | | CTTGTACCTCCAAATGAACTCCCTGCGGGCCGAAGATACCGC |
| | | CGTGTATTACTGCGTGCTGTGGTTCGGAGAGGGATTCGACCC |
| | | GTGGGGACAAGGAACACTCGTGACTGTGTCATCCGGCGGAGG |
| | | CGGCAGCGGTGGCGGCGGTTCCGGCGGCGGCGGATCTGACAT |
| | | CGTGTTGACCCAGTCCCCTCTGAGCCTGCCGGTCACTCCTGGC |
| | | GAACCAGCCAGCATCTCCTGCCGGTCGAGCCAGTCCCTCCTG |
| | | CACTCCAATGGGTACAACTACCTCGATTGGTATCTGCAAAAG |
| | | CCGGGCCAGAGCCCCCAGCTGCTGATCTACCTTGGGTCAAAC |
| | | CGCGCTTCCGGGGTGCCTGATAGATTCTCCGGGTCCGGGAGC |
| | | GGAACCGACTTTACCCTGAAAATCTCGAGGGTGGAGGCCGAG |
| | | GACGTCGGAGTGTACTACTGCATGCAGGCGCTCCAGACTCCC |
| | | CTGACCTTCGGAGGAGGAACGAAGGTCGACATCAAGACCACT |
| | | ACCCCAGCACCGAGGCCACCCACCCCGGCTCCTACCATCGCC |
| | | TCCCAGCCTCTGTCCCTGCGTCCGGAGGCATGTAGACCCGCA |
| | | GCTGGTGGGGCCGTGCATACCCGGGGTCTTGACTTCGCCTGC |
| | | GATATCTACATTTGGGCCCCTCTGGCTGGTACTTGCGGGGTCC |
| | | TGCTGCTTTCACTCGTGATCACTCTTTACTGTAAGCGCGGTCG |
| | | GAAGAAGCTGCTGTACATCTTTAAGCAACCCTTCATGAGGCC |
| | | TGTGCAGACTACTCAAGAGGAGGACGGCTGTTCATGCCGGTT |
| | | CCCAGAGGAGGAGGAAGGCGGCTGCGAACTGCGCGTGAAAT |
| | | TCAGCCGCAGCGCAGATGCTCCAGCCTACAAGCAGGGGCAGA |
| | | ACCAGCTCTACAACGAACTCAATCTTGGTCGGAGAGAGGAGT |
| | | ACGACGTGCTGGACAAGCGGAGAGGACGGGACCCAGAAATG |
| | | GGCGGGAAGCCGCGCAGAAAGAATCCCCAAGAGGGCCTGTA |
| | | CAACGAGCTCCAAAAGGATAAGATGGCAGAAGCCTATAGCG |
| | | AGATTGGTATGAAAGGGGAACGCAGAAGAGGCAAAGGCCAC |
| | | GACGGACTGTACCAGGGACTCAGCACCGCCACCAAGGACACC |
| | | TATGACGCTCTTCACATGCAGGCCCTGCCGCCTCGG |

BCMA_EBB-C1981-C3

| | | |
|---|---|---|
| BCMA_EBB- | 148 | QVQLVESGGGLVQPGGSLRLSCAASGFTFSSYAMSWVRQAPGK |
| C1981- | | GLEWVSAISGSGGSTYYADSVKGRFTISRDNSKNTLYLQMNSLR |
| C3- aa | | AEDTAVYYCAKVGYDSSGYYRDYYGMDVWGQGTTVTVSSGG |
| ScFv | | GGSGGGGSGGGGSEIVLTQSPGTLSLSPGERATLSCRASQSVSSS |
| domain | | YLAWYQQKPGQAPRLLIYGTSSRATGISDRFSGSGSGTDFTLTIS |
| | | RLEPEDFAVYYCQHYGNSPPKFTFGPGTKLEIK |
| BCMA_EBB- | 169 | CAAGTGCAGCTCGTGGAGTCAGGCGGAGGACTGGTGCAGCCC |
| C1981-C3- nt | | GGGGGCTCCCTGAGACTTTCCTGCGCGGCATCGGGTTTTACCT |
| ScFv | | TCTCCTCCTATGCTATGTCCTGGGTGCGCCAGGCCCCGGGAAA |
| domain | | GGGACTGGAATGGGTGTCCGCAATCAGCGGTAGCGGGGGCTC |
| | | AACATACTACGCCGACTCCGTCAAGGGTCGCTTCACTATTTCC |
| | | CGGGACAACTCCAAGAATACCCTGTACCTCCAAATGAACAGC |
| | | CTCAGGGCCGAGGATACTGCCGTGTACTACTGCGCCAAAGTC |
| | | GGATACGATAGCTCCGGTTACTACCGGGACTACTACGGAATG |
| | | GACGTGTGGGGACAGGGCACCACCGTGACCGTGTCAAGCGGC |
| | | GGAGGCGGTTCAGGAGGGGGAGGCTCCGGCGGTGGAGGGTC |
| | | CGAAATCGTCCTGACTCAGTCGCCTGGCACTCTGTCGTTGTCC |
| | | CCGGGGGAGCGCGCTACCCTGTCGTGTCGGGCGTCGCAGTCC |
| | | GTGTCGAGCTCCTACCTCGCGTGGTACCAGCAGAAGCCCGGA |
| | | CAGGCCCCTAGACTTCTGATCTACGGCACTTCTTCACGCGCCA |
| | | CCGGGATCAGCGACAGGTTCAGCGGCTCCGGCTCCGGGACCG |
| | | ACTTCACCCTGACCATTAGCCGGCTGGAGCCTGAAGATTTCGC |
| | | CGTGTATTACTGCCAACACTACGGAAACTCGCCGCCAAAGTT |
| | | CACGTTCGGACCCGGAACCAAGCTGGAAATCAAG |
| BCMA_EBB- | 190 | QVQLVESGGGLVQPGGSLRLSCAASGFTFSSYAMSWVRQAPGK |
| C1981- | | GLEWVSAISGSGGSTYYADSVKGRFTISRDNSKNTLYLQMNSLR |
| C3- aa | | AEDTAVYYCAKVGYDSSGYYRDYYGMDVWGQGTTVTVSS |
| VH | | |
| BCMA_EBB- | 211 | EIVLTQSPGTLSLSPGERATLSCRASQSVSSSYLAWYQQKPGQAP |
| C1981- | | RLLIYGTSSRATGISDRFSGSGSGTDFTLTISRLEPEDFAVYYCQH |
| C3- aa | | YGNSPPKFTFGPGTKLEIK |
| VL | | |
| BCMA_EBB- | 232 | MALPVTALLLPLALLLHAARPQVQLVESGGGLVQPGGSLRLSCA |
| C1981- | | AS GFTFSSYAMSWVRQAPGKGLEWVSAISGSGGSTYYADSVKG |
| C3- aa | | RFTISRDNSKNTLYLQMNSLRAEDTAVYYCAKVGYDSSGYYRD |
| Full CART | | YYGMDVWGQGTTVTVSSGGGGSGGGGSGGGGSEIVLTQSPGTL |
| | | SLSPGERATLSCRASQSVSSSYLAWYQQKPGQAPRLLIYGTSSRA |
| | | TGISDRFSGSGSGTDFTLTISRLEPEDFAVYYCQHYGNSPPKFTFG |
| | | PGTKLEIKTTTPAPRPPTPAPTIASQPLSLRPEACRPAAGGAVHTR |
| | | GLDFACDIYIWAPLAGTCGVLLLSLVITLYCKRGRKKLLYIFKQP |
| | | FMRPVQTTQEEDGCSCRFPEEEEGGCELRVKFSRSADAPAYKQG |
| | | QNQLYNELNLGRREEYDVLDKRRGRDPEMGGKPRRKNPQEGL |
| | | YNELQKDKMAEAYSEIGMKGERRRGKGHDGLYQGLSTATKDT |
| | | YDALHMQALPPR |
| BCMA_EBB- | 253 | ATGGCCCTCCCTGTCACCGCCCTGCTGCTTCCGCTGGCTCTTC |
| C1981- | | TGCTCCACGCCGCTCGGCCCCAAGTGCAGCTCGTGGAGTCAG |
| C3- nt | | GCGGAGGACTGGTGCAGCCCGGGGGCTCCCTGAGACTTTCCT |
| Full CART | | GCGCGGCATCGGGTTTTACCTTCTCCTCCTATGCTATGTCCTG |
| | | GGTGCGCCAGGCCCCGGGAAAGGGACTGGAATGGGTGTCCGC |
| | | AATCAGCGGTAGCGGGGGCTCAACATACTACGCCGACTCCGT |
| | | CAAGGGTCGCTTCACTATTTCCCGGGACAACTCCAAGAATAC |
| | | CCTGTACCTCCAAATGAACAGCCTCAGGGCCGAGGATACTGC |
| | | CGTGTACTACTGCGCCAAAGTCGGATACGATAGCTCCGGTTA |
| | | CTACCGGGACTACTACGGAATGGACGTGTGGGGACAGGGCAC |
| | | CACCGTGACCGTGTCAAGCGGCGGAGGCGGTTCAGGAGGGG |
| | | GAGGCTCCGGCGGTGGAGGGTCCGAAATCGTCCTGACTCAGT |
| | | CGCCTGGCACTCTGTCGTTGTCCCCGGGGGAGCGCGCTACCCT |
| | | GTCGTGTCGGGCGTCGCAGTCCGTGTCGAGCTCCTACCTCGCG |
| | | TGGTACCAGCAGAAGCCCGGACAGGCCCCTAGACTTCTGATC |
| | | TACGGCACTTCTTCACGCGCCACCGGGATCAGCGACAGGTTC |
| | | AGCGGCTCCGGCTCCGGGACCGACTTCACCCTGACCATTAGC |
| | | CGGCTGGAGCCTGAAGATTTCGCCGTGTATTACTGCCAACACT |
| | | ACGGAAACTCGCCGCCAAAGTTCACGTTCGGACCCGGAACCA |
| | | AGCTGGAAATCAAGACCACTACCCCAGCACCGAGGCCACCCA |
| | | CCCCGGCTCCTACCATCGCCTCCCAGCCTCTGTCCCTGCGTCC |
| | | GGAGGCATGTAGACCCGCAGCTGGTGGGGCCGTGCATACCCG |
| | | GGGTCTTGACTTCGCCTGCGATATCTACATTTGGGCCCCTCTG |
| | | GCTGGTACTTGCGGGGTCCTGCTGCTTTCACTCGTGATCACTC |
| | | TTTACTGTAAGCGCGGTCGGAAGAAGCTGCTGTACATCTTTAA |
| | | GCAACCCTTCATGAGGCCTGTGCAGACTACTCAAGAGGAGGA |
| | | CGGCTGTTCATGCCGGTTCCCAGAGGAGGAGGAAGGCGGCTG |
| | | CGAACTGCGCGTGAAATTCAGCCGCAGCGCAGATGCTCCAGC |
| | | CTACAAGCAGGGGCAGAACCAGCTCTACAACGAACTCAATCT |
| | | TGGTCGGAGAGAGGAGTACGACGTGCTGGACAAGCGGAGAG |
| | | GACGGGACCCAGAAATGGGCGGGAAGCCGCGCAGAAAGAAT |
| | | CCCCAAGAGGGCCTGTACAACGAGCTCCAAAAGGATAAGATG |
| | | GCAGAAGCCTATAGCGAGATTGGTATGAAAGGGGAACGCAG |
| | | AAGAGGCAAAGGCCACGACGGACTGTACCAGGGACTCAGCA |
| | | CCGCCACCAAGGACACCTATGACGCTCTTCACATGCAGGCCC |
| | | TGCCGCCTCGG |

BCMA_EBB-C1978-G4

| | | |
|---|---|---|
| BCMA_EBB- | 149 | EVQLVESGGGLVQPGGSLRLSCAASGFTFSSYAMSWVRQAPGK |
| C1978- | | GLEWVSAISGSGGSTYYADSVKGRFTISRDNSKNTLYLQMNSLR |
| G4- aa | | AEDTAVYYCAKMGWSSGYLGAFDIWGQGTTVTVSSGGGGSGG |
| ScFv | | GGSGGGGSEIVLTQSPGTLSLSPGERATLSCRASQSVASSFLAWY |
| domain | | QQKPGQAPRLLIYGASGRATGIPDRFSGSGSGTDFTLTISRLEPED |
| | | FAVYYCQHYGGSPRLTFGGGTKVDIK |
| BCMA_EBB- | 170 | GAAGTCCAACTGGTGGAGTCCGGGGGAGGGCTCGTGCAGCCC |
| C1978- | | GGAGGCAGCCTTCGGCTGTCGTGCGCCGCCTCCGGGTTCACG |
| G4- nt | | TTCTCATCCTACGCGATGTCGTGGGTCAGACAGGCACCAGGA |
| ScFv | | AAGGGACTGGAATGGGTGTCCGCCATTAGCGGCTCCGGCGGT |
| domain | | AGCACCTACTATGCCGACTCAGTGAAGGGAAGGTTCACTATC |
| | | TCCCGCGACAACAGCAAGAACACCCTGTACCTCCAAATGAAC |
| | | TCTCTGCGGGCCGAGGATACCGCGGTGTACTATTGCGCCAAG |
| | | ATGGGTTGGTCCAGCGGATACTTGGGAGCCTTCGACATTTGG |
| | | GGACAGGGCACTACTGTGACCGTGTCCTCCGGGGGTGGCGGA |
| | | TCGGGAGGCGGCGGCTCGGGTGGAGGGGGTTCCGAAATCGTG |
| | | TTGACCCAGTCACCGGGAACCCTCTCGCTGTCCCCGGGAGAA |
| | | CGGGCTACACTGTCATGTAGAGCGTCCCAGTCCGTGGCTTCCT |
| | | CGTTCCTGGCCTGGTACCAGCAGAAGCCGGGACAGGCACCCC |
| | | GCCTGCTCATCTACGGAGCCAGCGGCCGGGCGACCGGCATCC |
| | | CTGACCGCTTCTCCGGTTCCGGCTCGGGCACCGACTTTACTCT |
| | | GACCATTAGCAGGCTTGAGCCCGAGGATTTTGCCGTGTACTA |
| | | CTGCCAACACTACGGGGGGAGCCCTCGCCTGACCTTCGGAGG |
| | | CGGAACTAAGGTCGATATCAAAA |
| BCMA_EBB- | 191 | EVQLVESGGGLVQPGGSLRLSCAASGFTFSSYAMSWVRQAPGK |
| C1978- | | GLEWVSAISGSGGSTYYADSVKGRFTISRDNSKNTLYLQMNSLR |
| G4- aa | | AEDTAVYYCAKMGWSSGYLGAFDIWGQGTTVTVSS |
| VH | | |
| BCMA_EBB- | 212 | EIVLTQSPGTLSLSPGERATLSCRASQSVASSFLAWYQQKPGQAP |
| C1978- | | RLLIYGASGRATGIPDRFSGSGSGTDFTLTISRLEPEDFAVYYCQH |
| G4- aa | | YGGSPRLTFGGGTKVDIK |
| VL | | |
| BCMA_EBB- | 233 | MALPVTALLLPLALLLHAARPEVQLVESGGGLVQPGGSLRLSCA |
| C1978- | | ASGFTFSSYAMSWVRQAPGKGLEWVSAISGSGGSTYYADSVKG |
| G4- aa | | RFTISRDNSKNTLYLQMNSLRAEDTAVYYCAKMGWSSGYLGAF |
| Full CART | | DIWGQGTTVTVSSGGGGSGGGGSGGGGSEIVLTQSPGTLSLSPGE |
| | | RATLSCRASQSVASSFLAWYQQKPGQAPRLLIYGASGRATGIPD |
| | | RFSGSGSGTDFTLTISRLEPEDFAVYYCQHYGGSPRLTFGGGTKV |
| | | DIKTTTPAPRPPTPAPTIASQPLSLRPEACRPAAGGAVHTRGLDFA |
| | | CDIYIWAPLAGTCGVLLLSLVITLYCKRGRKKLLYIFKQPFMRPV |
| | | QTTQEEDGCSCRFPEEEEGGCELRVKFSRSADAPAYKQGQNQLY |
| | | NELNLGRREEYDVLDKRRGRDPEMGGKPRRKNPQEGLYNELQK |
| | | DKMAEAYSEIGMKGERRRGKGHDGLYQGLSTATKDTYDALHM |
| | | QALPPR |
| BCMA_EBB- | 254 | ATGGCCCTCCCTGTCACCGCCCTGCTGCTTCCGCTGGCTCTTC |
| C1978- | | TGCTCCACGCCGCTCGGCCCGAAGTCCAACTGGTGGAGTCCG |
| G4- nt | | GGGGAGGGCTCGTGCAGCCCGGAGGCAGCCTTCGGCTGTCGT |
| Full CART | | GCGCCGCCTCCGGGTTCACGTTCTCATCCTACGCGATGTCGTG |
| | | GGTCAGACAGGCACCAGGAAAGGGACTGGAATGGGTGTCCG |
| | | CCATTAGCGGCTCCGGCGGTAGCACCTACTATGCCGACTCAG |
| | | TGAAGGGAAGGTTCACTATCTCCCGCGACAACAGCAAGAACA |
| | | CCCTGTACCTCCAAATGAACTCTCTGCGGGCCGAGGATACCG |
| | | CGGTGTACTATTGCGCCAAGATGGGTTGGTCCAGCGGATACT |
| | | TGGGAGCCTTCGACATTTGGGGACAGGGCACTACTGTGACCG |
| | | TGTCCTCCGGGGGTGGCGGATCGGGAGGCGGCGGCTCGGGTG |
| | | GAGGGGGTTCCGAAATCGTGTTGACCCAGTCACCGGGAACCC |
| | | TCTCGCTGTCCCCGGGAGAACGGGCTACACTGTCATGTAGAG |
| | | CGTCCCAGTCCGTGGCTTCCTCGTTCCTGGCCTGGTACCAGCA |
| | | GAAGCCGGGACAGGCACCCCGCCTGCTCATCTACGGAGCCAG |
| | | CGGCCGGGCGACCGGCATCCCTGACCGCTTCTCCGGTTCCGG |
| | | CTCGGGCACCGACTTTACTCTGACCATTAGCAGGCTTGAGCCC |
| | | GAGGATTTTGCCGTGTACTACTGCCAACACTACGGGGGGAGC |
| | | CCTCGCCTGACCTTCGGAGGCGGAACTAAGGTCGATATCAAA |
| | | ACCACTACCCCAGCACCGAGGCCACCCACCCCGGCTCCTACC |
| | | ATCGCCTCCCAGCCTCTGTCCCTGCGTCCGGAGGCATGTAGAC |
| | | CCGCAGCTGGTGGGGCCGTGCATACCCGGGGTCTTGACTTCG |
| | | CCTGCGATATCTACATTTGGGCCCCTCTGGCTGGTACTTGCGG |
| | | GGTCCTGCTGCTTTCACTCGTGATCACTCTTTACTGTAAGCGC |
| | | GGTCGGAAGAAGCTGCTGTACATCTTTAAGCAACCCTTCATG |
| | | AGGCCTGTGCAGACTACTCAAGAGGAGGACGGCTGTTCATGC |
| | | CGGTTCCCAGAGGAGGAGGAAGGCGGCTGCGAACTGCGCGT |
| | | GAAATTCAGCCGCAGCGCAGATGCTCCAGCCTACAAGCAGGG |
| | | GCAGAACCAGCTCTACAACGAACTCAATCTTGGTCGGAGAGA |
| | | GGAGTACGACGTGCTGGACAAGCGGAGAGGACGGGACCCAG |
| | | AAATGGGCGGGAAGCCGCGCAGAAAGAATCCCCAAGAGGGC |
| | | CTGTACAACGAGCTCCAAAAGGATAAGATGGCAGAAGCCTAT |
| | | AGCGAGATTGGTATGAAAGGGGAACGCAGAAGAGGCAAAGG |
| | | CCACGACGGACTGTACCAGGGACTCAGCACCGCCACCAAGGA |
| | | CACCTATGACGCTCTTCACATGCAGGCCCTGCCGCCTCGG |

TABLE 15
Heavy Chain Variable Domain CDRs according to the Kabat numbering scheme
(Kabat et al. (1991), “Sequences of Proteins of Immunological Interest,”
5th Ed. Public Health Service, National Institutes of Health, Bethesda, MD)

| | | SEQ | | SEQ | | SEQ |
|---|---|---|---|---|---|---|
| Candidate | HCDR1 | ID NO | HCDR2 | ID NO | HCDR3 | ID NO |
| 139109 | NHGMS | 1118 | GIVYSGSTYYAA | 1158 | HGGESDV | 1198 |
| | | | SVKG | | | |
| 139103 | NYAMS | 1119 | GISRSGENTYYA | 1159 | SPAHYYGGMDV | 1199 |
| | | | DSVKG | | | |
| 139105 | DYAMH | 1120 | GISWNSGSIGYA | 1160 | HSFLAY | 1200 |
| | | | DSVKG | | | |
| 139111 | NHGMS | 1121 | GIVYSGSTYYAA | 1161 | HGGESDV | 1201 |
| | | | SVKG | | | |
| 139100 | NFGIN | 1122 | WINPKNNNTNY | 1162 | GPYYYQSYMDV | 1202 |
| | | | AQKFQG | | | |
| 139101 | SDAMT | 1123 | VISGSGGTTYYA | 1163 | LDSSGYYYARGP | 1203 |
| | | | DSVKG | | RY | |
| 139102 | NYGIT | 1124 | WISAYNGNTNY | 1164 | GPYYYYMDV | 1204 |
| | | | AQKFQG | | | |
| 139104 | NHGMS | 1125 | GIVYSGSTYYAA | 1165 | HGGESDV | 1205 |
| | | | SVKG | | | |
| 139106 | NHGMS | 1126 | GIVYSGSTYYAA | 1166 | HGGESDV | 1206 |
| | | | SVKG | | | |
| 139107 | NHGMS | 1127 | GIVYSGSTYYAA | 1167 | HGGESDV | 1207 |
| | | | SVKG | | | |
| 139108 | DYYMS | 1128 | YISSSGSTIYYAD | 1168 | ESGDGMDV | 1208 |
| | | | SVKG | | | |
| 139110 | DYYMS | 1129 | YISSSGNTIYYAD | 1169 | STMVREDY | 1209 |
| | | | SVKG | | | |
| 139112 | NHGMS | 1130 | GIVYSGSTYYAA | 1170 | HGGESDV | 1210 |
| | | | SVKG | | | |
| 139113 | NHGMS | 1131 | GIVYSGSTYYAA | 1171 | HGGESDV | 1211 |
| | | | SVKG | | | |
| 139114 | NHGMS | 1132 | GIVYSGSTYYAA | 1172 | HGGESDV | 1212 |
| | | | SVKG | | | |
| 149362 | SSYYY | 1133 | SIYYSGSAYYNP | 1173 | HWQEWPDAFDI | 1213 |
| | WG | | SLKS | | | |
| 149363 | TSGMC | 1134 | RIDWDEDKFYST | 1174 | SGAGGTSATAFD | 1214 |
| | VS | | SLKT | | I | |
| 149364 | SYSMN | 1135 | SISSSSSYIYYAD | 1175 | TIAAVYAFDI | 1215 |
| | | | SVKG | | | |
| 149365 | DYYMS | 1136 | YISSSGSTIYYAD | 1176 | DLRGAFDI | 1216 |
| | | | SVKG | | | |
| 149366 | SHYIH | 1137 | MINPSGGVTAYS | 1177 | EGSGSGWYFDF | 1217 |
| | | | QTLQG | | | |
| 149367 | SGGYY | 1138 | YIYYSGSTYYNP | 1178 | AGIAARLRGAFD | 1218 |
| | WS | | SLKS | | I | |
| 149368 | SYAIS | 1139 | GIIPIFGTANYAQ | 1179 | RGGYQLLRWDV | 1219 |
| | | | KFQG | | GLLRSAFDI | |
| 149369 | SNSAA | 1140 | RTYYRSKWYSF | 1180 | SSPEGLFLYWFD | 1220 |
| | WN | | YAISLKS | | P | |
| BCMA_EBB- | SYAMS | 1141 | AISGSGGSTYYA | 1181 | VEGSGSLDY | 1221 |
| C1978-A4 | | | DSVKG | | | |
| BCMA_EBB- | RYPMS | 1142 | GISDSGVSTYYA | 1182 | RAGSEASDI | 1222 |
| C1978-G1 | | | DSAKG | | | |
| BCMA_EBB- | SYAMS | 1143 | AISGSGGSTYYA | 1183 | ATYKRELRYYY | 1223 |
| C1979-C1 | | | DSVKG | | GMDV | |
| BCMA_EBB- | SYAMS | 1144 | AISGSGGSTYYA | 1184 | ATYKRELRYYY | 1224 |
| C1978-C7 | | | DSVKG | | GMDV | |
| BCMA_EBB- | DYAMH | 1145 | GISWNSGSIGYA | 1185 | VGKAVPDV | 1225 |
| C1978-D10 | | | DSVKG | | | |
| BCMA_EBB- | DYAMH | 1146 | SINWKGNSLAY | 1186 | HQGVAYYNYAM | 1226 |
| C1979-C12 | | | GDSVKG | | DV | |
| BCMA_EBB- | SYAMS | 1147 | AISGSGGSTYYA | 1187 | VVRDGMDV | 1227 |
| C1980-G4 | | | DSVKG | | | |
| BCMA_EBB- | SYAMS | 1148 | AISGSGGSTYYA | 1188 | IPQTGTFDY | 1228 |
| C1980-D2 | | | DSVKG | | | |
| BCMA_EBB- | SYAMS | 1149 | AISGSGGSTYYA | 1189 | ANYKRELRYYY | 1229 |
| C1978-A10 | | | DSVKG | | GMDV | |
| BCMA_EBB- | SYAMS | 1150 | AISGSGGSTYYA | 1190 | ALVGATGAFDI | 1230 |
| C1978-D4 | | | DSVKG | | | |
| BCMA_EBB- | SYAMS | 1151 | AISGSGGSTYYA | 1191 | WFGEGFDP | 1231 |
| C1980-A2 | | | DSVKG | | | |
| BCMA_EBB- | SYAMS | 1152 | AISGSGGSTYYA | 1192 | VGYDSSGYYRD | 1232 |
| C1981-C3 | | | DSVKG | | YYGMDV | |
| BCMA_EBB- | SYAMS | 1153 | AISGSGGSTYYA | 1193 | MGWSSGYLGAF | 1233 |
| C1978-G4 | | | DSVKG | | DI | |
| A7D12.2 | NFGMN | 1154 | WINTYTGESYFA | 1194 | GEIYYGYDGGFA | 1234 |
| | | | DDFKG | | Y | |
| C11D5.3 | DYSIN | 1155 | WINTETREPAYA | 1195 | DYSYAMDY | 1235 |
| | | | YDFRG | | | |
| C12A3.2 | HYSMN | 1156 | RINTESGVPIYAD | 1196 | DYLYSLDF | 1236 |
| | | | DFKG | | | |
| C13F12.1 | HYSMN | 1157 | RINTETGEPLYA | 1197 | DYLYSCDY | 1237 |
| | | | DDFKG | | | |

TABLE 16
Light Chain Variable Domain CDRs according to the Kabat numbering scheme
(Kabat et al. (1991), “Sequences of Proteins of Immunological Interest,”
5th Ed. Public Health Service, National Institutes of Health, Bethesda, MD)

| | | SEQ | | SEQ | | SEQ ID |
|---|---|---|---|---|---|---|
| Candidate | LCDR1 | ID NO | LCDR2 | ID NO | LCDR3 | NO |
| 139109 | RASQSISSYLN | 1238 | AASSLQS | 1278 | QQSYSTPYT | 1318 |
| 139103 | RASQSISSSFLA | 1239 | GASRRAT | 1279 | QQYHSSPSW | 1319 |
| | | | | | T | |
| 139105 | RSSQSLLHSNGYN | 1240 | LGSNRAS | 1280 | MQALQTPY | 1320 |
| | YLD | | | | T | |
| 139111 | KSSQSLLRNDGK | 1241 | EVSNRFS | 1281 | MQNIQFPS | 1321 |
| | TPLY | | | | | |
| 139100 | RSSQSLLHSNGYN | 1242 | LGSKRAS | 1282 | MQALQTPY | 1322 |
| | YLN | | | | T | |
| 139101 | RASQSISSYLN | 1243 | GASTLAS | 1283 | QQSYKRAS | 1323 |
| 139102 | RSSQSLLYSNGYN | 1244 | LGSNRAS | 1284 | MQGRQFPYS | 1324 |
| | YVD | | | | | |
| 139104 | RASQSVSSNLA | 1245 | GASTRAS | 1285 | QQYGSSLT | 1325 |
| 139106 | RASQSVSSKLA | 1246 | GASIRAT | 1286 | QQYGSSSWT | 1326 |
| 139107 | RASQSVGSTNLA | 1247 | DASNRAT | 1287 | QQYGSSPPW | 1327 |
| | | | | | T | |
| 139108 | RASQSISSYLN | 1248 | AASSLQS | 1288 | QQSYTLA | 1328 |
| 139110 | KSSESLVHNSGKT | 1249 | EVSNRDS | 1289 | MQGTHWPG | 1329 |
| | YLN | | T | | | |
| 139112 | QASEDINKFLN | 1250 | DASTLQT | 1290 | QQYESLPLT | 1330 |
| 139113 | RASQSVGSNLA | 1251 | GASTRAT | 1291 | QQYNDWLP | 1331 |
| | | | | | VT | |
| 139114 | RASQSIGSSSLA | 1252 | GASSRAS | 1292 | QQYAGSPPF | 1332 |
| | | | | | T | |
| 149362 | KASQDIDDAMN | 1253 | SATSPVP | 1293 | LQHDNFPLT | 1333 |
| 149363 | RASQDIYNNLA | 1254 | AANKSQS | 1294 | QHYYRFPYS | 1334 |
| 149364 | RSSQSLLHSNGYN | 1255 | LGSNRAS | 1295 | MQALQTPY | 1335 |
| | YLD | | | | T | |
| 149365 | GGNNIGTKSVH | 1256 | DDSVRPS | 1296 | QVWDSDSE | 1336 |
| | | | | | HVV | |
| 149366 | SGDGLSKKYVS | 1257 | RDKERPS | 1297 | QAWDDTTV | 1337 |
| | | | | | V | |
| 149367 | RASQGIRNWLA | 1258 | AASNLQS | 1298 | QKYNSAPFT | 1338 |
| 149368 | GGNNIGSKSVH | 1259 | GKNNRPS | 1299 | SSRDSSGDH | 1339 |
| | | | | | LRV | |
| 149369 | QGDSLGNYYAT | 1260 | GTNNRPS | 1300 | NSRDSSGHH | 1340 |
| | | | | | LL | |
| BCMA_EBB- | RASQSVSSAYLA | 1261 | GASTRAT | 1301 | QHYGSSFNG | 1341 |
| C1978- | | | | | SSLFT | |
| A4 | | | | | | |
| BCMA_EBB- | RASQSVSNSLA | 1262 | DASSRAT | 1302 | QQFGTSSGL | 1342 |
| C1978- | | | | | T | |
| G1 | | | | | | |
| BCMA_EBB- | RASQSVSSSFLA | 1263 | GASSRAT | 1303 | QQYHSSPSW | 1343 |
| C1979- | | | | | T | |
| C1 | | | | | | |
| BCMA_EBB- | RASQSVSTTFLA | 1264 | GSSNRAT | 1304 | QQYHSSPSW | 1344 |
| C1978- | | | | | T | |
| C7 | | | | | | |
| BCMA_EBB- | RASQSISSYLN | 1265 | AASSLQS | 1305 | QQSYSTPYS | 1345 |
| C1978- | | | | | | |
| D10 | | | | | | |
| BCMA_EBB- | RATQSIGSSFLA | 1266 | GASQRAT | 1306 | QHYESSPSW | 1346 |
| C1979- | | | | | T | |
| C12 | | | | | | |
| BCMA_EBB- | RASQSVSSSYLA | 1267 | GASSRAT | 1307 | QQYGSPPRF | 1347 |
| C1980- | | | | | T | |
| G4 | | | | | | |
| BCMA_EBB- | RASQSVSSSYLA | 1268 | GASSRAT | 1308 | QHYGSSPSW | 1348 |
| C1980- | | | | | T | |
| D2 | | | | | | |
| BCMA_EBB- | RASQRVASNYLA | 1269 | GASSRAT | 1309 | QHYDSSPSW | 1349 |
| C1978- | | | | | T | |
| A10 | | | | | | |
| BCMA_EBB- | RASQSLSSNFLA | 1270 | GASNWA | 1310 | QYYGTSPM | 1350 |
| C1978- | | | T | | YT | |
| D4 | | | | | | |
| BCMA-EBB- | RSSQSLLHSNGYN | 1271 | LGSNRAS | 1311 | MQALQTPLT | 1351 |
| C1980- | YLD | | | | | |
| A2 | | | | | | |
| BCMA_EBB- | RASQSVSSSYLA | 1272 | GTSSRAT | 1312 | QHYGNSPPK | 1352 |
| C1981- | | | | | FT | |
| C3 | | | | | | |
| BCMA_EBB- | RASQSVASSFLA | 1273 | GASGRAT | 1313 | QHYGGSPRL | 1353 |
| C1978- | | | | | T | |
| G4 | | | | | | |
| A7D12.2 | RASQDVNTAVS | 1274 | SASYRYT | 1314 | QQHYSTPW | 1354 |
| C11D5.3 | RASESVSVIGAHL | 1275 | LASNLET | 1315 | LQSRIFPRT | 1355 |
| | IH | | | | | |
| C12A3.2 | RASESVTILGSHLI | 1276 | LASNVQT | 1316 | LQSRTIPRT | 1356 |
| | Y | | | | | |
| C13F12.1 | RASESVTILGSHLI | 1277 | LASNVQT | 1317 | LQSRTIPRT | 1357 |
| | Y | | | | | |

### CD20 CAR and CD20-Binding Sequences

[0403] In some embodiments, the TOX^{hi} CAR cell described herein is a CD20 CAR-expressing cell (e.g., a cell expressing a CAR that binds to human CD20). In some embodiments, the CD20 CAR-expressing cell includes an antigen binding domain according to WO2016/164731 and PCT/US2017/055627, incorporated herein by reference. Exemplary CD20-binding sequences or CD20 CAR sequences are disclosed in, e.g., Tables 1-5 of PCT/US2017/055627. In some embodiments, the CD20-binding sequences or CD20 CAR comprises a CDR, variable region, scFv, or full-length sequence of a CD20 CAR disclosed in PCT/US2017/055627 or WO2016/164731.

[0404] In some embodiments, the CAR molecule comprises an antigen binding domain that binds specifically to CD20 (CD20 CAR). In some embodiments, the antigen binding domain targets human CD20. In some embodiments, the antigen binding domain includes a single chain Fv sequence as described herein. The sequences of human CD20 CAR are provided below.

TABLE 32

| SEQ ID | | |
|---|---|---|
| NUMBER | Ab region | Sequence |
| CD20-C3H2 | | |
| SEQ ID NO: | HCDR1 | NYNLH |
| 2019 (Kabat) | | |
| SEQ ID NO: | HCDR2 | AIYPGNYDTSYNQKFKG |
| 2020 (Kabat) | | |
| SEQ ID NO: | HCDR3 | VDFGHSRYWYFDV |
| 2021 (Kabat) | | |
| SEQ ID NO: | HCDR1 | GYTFTNY |
| 2022 (Chothia) | | |
| SEQ ID NO: | HCDR2 | YPGNYD |
| 2023 (Chothia) | | |
| SEQ ID NO: | HCDR3 | VDFGHSRYWYFDV |
| 2021 (Chothia) | | |
| SEQ ID NO: | HCDR1 | GYTFTNYN |
| 2024 (IMGT) | | |
| SEQ ID NO: | HCDR2 | IYPGNYDT |
| 2025 (IMGT) | | |
| SEQ ID NO: | HCDR3 | ARVDFGHSRYWYFDV |
| 2026 (IMGT) | | |
| SEQ ID NO: | HCDR1 | |
| 2027 (Combined | GYTFTNYNLH | |
| Chothia and | | |
| Kabat) | | |
| SEQ ID NO: | HCDR2 | |
| 2020 (Combined | AIYPGNYDTSYNQKFKG | |
| Chothia and | | |
| Kabat) | | |
| SEQ ID NO: | HCDR3 | |
| 2021 (Combined | VDFGHSRYWYFDV | |
| Chothia and | | |
| Kabat) | | |
| SEQ ID NO: | VH | QVQLVQSGAEVKKPGASVKVSCKASGYTFTNYNL |
| 2028 | | HWVRQAPGQGLEWMGAIYPGNYDTSYNQKFKGR |
| | | VTMTADKSTSTAYMELSSLRSEDTAVYYCARVDF |
| | | GHSRYWYFDVWGQGTTVTVSS |
| SEQ ID NO: | DNA VH | CAAGTCCAACTCGTCCAGTCCGGTGCAGAAGTC |
| 2029 | | AAGAAACCTGGAGCATCCGTGAAAGTGTCTTGC |
| | | AAAGCCTCCGGCTACACCTTCACCAACTACAACC |
| | | TCCATTGGGTCAGACAGGCCCCCGGACAAGGAC |
| | | TCGAATGGATGGGAGCGATCTACCCGGGAAACT |
| | | ACGACACCAGCTACAACCAGAAGTTCAAGGGCC |
| | | GCGTGACTATGACCGCCGATAAGAGCACCTCCA |
| | | CCGCCTACATGGAACTGTCCTCGCTGAGGTCCGA |
| | | GGACACTGCGGTGTACTACTGCGCCCGCGTGGA |
| | | CTTCGGACACTCACGGTATTGGTACTTCGACGTC |
| | | TGGGGACAGGGCACTACCGTGACCGTGTCGAGC |
| SEQ ID NO: | LCDR1 | RATSSVSSMN |
| 2030 (Kabat) | | |
| SEQ ID NO: | LCDR2 | ATSNLAS |
| 2031 (Kabat) | | |
| SEQ ID NO: | LCDR3 | QQWTFNPPT |
| 2032 (Kabat) | | |
| SEQ ID NO: | LCDR1 | TSSVSS |
| 2033 (Chothia) | | |
| SEQ ID NO: | LCDR2 | ATS |
| 2034 (Chothia) | | |
| SEQ ID NO: | LCDR3 | WTFNPP |
| 2035 (Chothia) | | |
| SEQ ID NO: | LCDR1 | SSVSS |
| 2036 (IMGT) | | |
| SEQ ID NO: | LCDR2 | ATS |
| 2034 (IMGT) | | |
| SEQ ID NO: | LCDR3 | QQWTFNPPT |
| 2032 (IMGT) | | |
| SEQ ID NO: | LCDR1 | |
| 2030 (Combined | RATSSVSSMN | |
| Chothia and | | |
| Kabat) | | |
| SEQ ID NO: | LCDR2 | |
| 2031 (Combined | ATSNLAS | |
| Chothia and | | |
| Kabat) | | |
| SEQ ID NO: | LCDR3 | |
| 2032 (Combined | QQWTFNPPT | |
| Chothia and | | |
| Kabat) | | |
| SEQ ID NO: | VL | DIQLTQSPSFLSASVGDRVTITCRATSSVSSMNWYQ |
| 2037 | | QKPGKAPKPLIHATSNLASGVPSRFSGSGSGTEYTL |
| | | TISSLQPEDFATYYCQQWTFNPPTFGQGTKLEIK |
| SEQ ID NO: | DNA VL | GATATCCAGCTGACTCAGTCCCCGTCATTCCTGT |
| 2038 | | CCGCCTCCGTGGGAGACAGAGTGACCATCACCT |
| | | GTCGGGCCACTTCCTCCGTGTCAAGCATGAACTG |
| | | GTATCAGCAGAAGCCCGGGAAGGCCCCAAAGCC |
| | | GCTGATTCACGCGACGTCCAACCTGGCTTCCGGC |
| | | GTGCCGAGCCGGTTCTCCGGCTCGGGGAGCGGG |
| | | ACTGAGTACACCCTGACTATTTCCTCGCTTCAAC |
| | | CCGAGGACTTTGCTACCTACTACTGCCAACAGTG |
| | | GACCTTCAATCCTCCGACATTCGGACAGGGTACC |
| | | AAGTTGGAAATCAAG |
| SEQ ID NO: | Linker | GGGGSGGGGSGGGGSGGGGS |
| 1010 | | |
| SEQ ID NO: | scFv (VH- | QVQLVQSGAEVKKPGASVKVSCKASGYTFTNYNL |
| 2039 | linker-VL) | HWVRQAPGQGLEWMGAIYPGNYDTSYNQKFKGR |
| | | VTMTADKSTSTAYMELSSLRSEDTAVYYCARVDF |
| | | GHSRYWYFDVWGQGTTVTVSSGGGGSGGGGSGG |
| | | GGSGGGGSDIQLTQSPSFLSASVGDRVTITCRATSS |
| | | VSSMNWYQQKPGKAPKPLIHATSNLASGVPSRFSG |
| | | SGSGTEYTLTISSLQPEDFATYYCQQWTFNPPTFGQ |
| | | GTKLEIK |
| SEQ ID NO: | DNA scFv | CAAGTCCAACTCGTCCAGTCCGGTGCAGAAGTCAAG |
| 2040 | (VH-linker- | AAACCTGGAGCATCCGTGAAAGTGTCTTGCAAAGCCT |
| | VL) | CCGGCTACACCTTCACCAACTACAACCTCCATTGGGT |
| | | CAGACAGGCCCCCGGACAAGGACTCGAATGGATGGG |
| | | AGCGATCTACCCGGGAAACTACGACACCAGCTACAA |
| | | CCAGAAGTTCAAGGGCCGCGTGACTATGACCGCCGA |
| | | TAAGAGCACCTCCACCGCCTACATGGAACTGTCCTCG |
| | | CTGAGGTCCGAGGACACTGCGGTGTACTACTGCGCCC |
| | | GCGTGGACTTCGGACACTCACGGTATTGGTACTTCGA |
| | | CGTCTGGGGACAGGGCACTACCGTGACCGTGTCGAG |
| | | CGGCGGAGGAGGTTCGGGAGGGGGCGGATCAGGGG |
| | | GCGGCGGCAGCGGTGGAGGGGGCTCGGATATCCAGC |
| | | TGACTCAGTCCCCGTCATTCCTGTCCGCCTCCGTGGG |
| | | AGACAGAGTGACCATCACCTGTCGGGCCACTTCCTCC |
| | | GTGTCAAGCATGAACTGGTATCAGCAGAAGCCCGGG |
| | | AAGGCCCCAAAGCCGCTGATTCACGCGACGTCCAAC |
| | | CTGGCTTCCGGCGTGCCGAGCCGGTTCTCCGGCTCGG |
| | | GGAGCGGGACTGAGTACACCCTGACTATTTCCTCGCT |
| | | TCAACCCGAGGACTTTGCTACCTACTACTGCCAACAG |
| | | TGGACCTTCAATCCTCCGACATTCGGACAGGGTACCA |
| | | AGTTGGAAATCAAG |
| SEQ ID NO: | Full CAR | MALPVTALLLPLALLLHAARPQVQLVQSGAEVKK |
| 2041 | amino acid | PGASVKVSCKASGYTFTNYNLHWVRQAPGQGLE |
| | sequence | WMGAIYPGNYDTSYNQKFKGRVTMTADKSTSTA |
| | | YMELSSLRSEDTAVYYCARVDFGHSRYWYFDVW |
| | | GQGTTVTVSSGGGGSGGGGSGGGGSGGGGSDIQL |
| | | TQSPSFLSASVGDRVTITCRATSSVSSMNWYQQKP |
| | | GKAPKPLIHATSNLASGVPSRFSGSGSGTEYTLTISS |
| | | LQPEDFATYYCQQWTFNPPTFGQGTKLEIKTTTPAP |
| | | RPPTPAPTIASQPLSLRPEACRPAAGGAVHTRGLDF |
| | | ACDIYIWAPLAGTCGVLLLSLVITLYCKRGRKKLL |
| | | YIFKQPFMRPVQTTQEEDGCSCRFPEEEEGGCELRV |
| | | KFSRSADAPAYQQGQNQLYNELNLGRREEYDVLD |
| | | KRRGRDPEMGGKPRRKNPQEGLYNELQKDKMAE |
| | | AYSEIGMKGERRRGKGHDGLYQGLSTATKDTYDA |
| | | LHMQALPPR |
| SEQ ID NO: | Full CAR | ATGGCCCTCCCTGTCACCGCCCTGCTGCTTCCGC |
| 2042 | nucleic acid | TGGCTCTTCTGCTCCACGCCGCTCGGCCCCAAGT |
| | sequence | CCAACTCGTCCAGTCCGGTGCAGAAGTCAAGAA |
| | | ACCTGGAGCATCCGTGAAAGTGTCTTGCAAAGC |
| | | CTCCGGCTACACCTTCACCAACTACAACCTCCAT |
| | | TGGGTCAGACAGGCCCCCGGACAAGGACTCGAA |
| | | TGGATGGGAGCGATCTACCCGGGAAACTACGAC |
| | | ACCAGCTACAACCAGAAGTTCAAGGGCCGCGTG |
| | | ACTATGACCGCCGATAAGAGCACCTCCACCGCCT |
| | | ACATGGAACTGTCCTCGCTGAGGTCCGAGGACA |
| | | CTGCGGTGTACTACTGCGCCCGCGTGGACTTCGG |
| | | ACACTCACGGTATTGGTACTTCGACGTCTGGGGA |
| | | CAGGGCACTACCGTGACCGTGTCGAGCGGCGGA |
| | | GGAGGTTCGGGAGGGGGCGGATCAGGGGGCGGC |
| | | GGCAGCGGTGGAGGGGGCTCGGATATCCAGCTG |
| | | ACTCAGTCCCCGTCATTCCTGTCCGCCTCCGTGG |
| | | GAGACAGAGTGACCATCACCTGTCGGGCCACTT |
| | | CCTCCGTGTCAAGCATGAACTGGTATCAGCAGA |
| | | AGCCCGGGAAGGCCCCAAAGCCGCTGATTCACG |
| | | CGACGTCCAACCTGGCTTCCGGCGTGCCGAGCCG |
| | | GTTCTCCGGCTCGGGGAGCGGGACTGAGTACAC |
| | | CCTGACTATTTCCTCGCTTCAACCCGAGGACTTT |
| | | GCTACCTACTACTGCCAACAGTGGACCTTCAATC |
| | | CTCCGACATTCGGACAGGGTACCAAGTTGGAAA |
| | | TCAAGACCACTACCCCAGCACCGAGGCCACCCA |
| | | CCCCGGCTCCTACCATCGCCTCCCAGCCTCTGTC |
| | | CCTGCGTCCGGAGGCATGTAGACCCGCAGCTGG |
| | | TGGGGCCGTGCATACCCGGGGTCTTGACTTCGCC |
| | | TGCGATATCTACATTTGGGCCCCTCTGGCTGGTA |
| | | CTTGCGGGGTCCTGCTGCTTTCACTCGTGATCAC |
| | | TCTTTACTGTAAGCGCGGTCGGAAGAAGCTGCTG |
| | | TACATCTTTAAGCAACCCTTCATGAGGCCTGTGC |
| | | AGACTACTCAAGAGGAGGACGGCTGTTCATGCC |
| | | GGTTCCCAGAGGAGGAGGAAGGCGGCTGCGAAC |
| | | TGCGCGTGAAATTCAGCCGCAGCGCAGATGCTC |
| | | CAGCCTACCAGCAGGGGCAGAACCAGCTCTACA |
| | | ACGAACTCAATCTTGGTCGGAGAGAGGAGTACG |
| | | ACGTGCTGGACAAGCGGAGAGGACGGGACCCAG |
| | | AAATGGGCGGGAAGCCGCGCAGAAAGAATCCCC |
| | | AAGAGGGCCTGTACAACGAGCTCCAAAAGGATA |
| | | AGATGGCAGAAGCCTATAGCGAGATTGGTATGA |
| | | AAGGGGAACGCAGAAGAGGCAAAGGCCACGAC |
| | | GGACTGTACCAGGGACTCAGCACCGCCACCAAG |
| | | GACACCTATGACGCTCTTCACATGCAGGCCCTGC |
| | | CGCCTCGG |
| CD20-C5H1 | | |
| SEQ ID NO: | HCDR1 | SYNMH |
| 2043 (Kabat) | | |
| SEQ ID NO: | HCDR2 | AIYPGNGDTSYNPKFKG |
| 2044 (Kabat) | | |
| SEQ ID NO: | HCDR3 | SYFYGSSSWYFDV |
| 2045 (Kabat) | | |
| SEQ ID NO: | HCDR1 | GYTFTSY |
| 2046 (Chothia) | | |
| SEQ ID NO: | HCDR2 | YPGNGD |
| 2047 (Chothia) | | |
| SEQ ID NO: | HCDR3 | SYFYGSSSWYFDV |
| 2045 (Chothia) | | |
| SEQ ID NO: | HCDR1 | GYTFTSYN |
| 2048 (IMGT) | | |
| SEQ ID NO: | HCDR2 | IYPGNGDT |
| 2049 (IMGT) | | |
| SEQ ID NO: | HCDR3 | ARSYFYGSSSWYFDV |
| 2050 (IMGT) | | |
| SEQ ID NO: | HCDR1 | GYTFTSYNMH |
| 2051 (Combined | | |
| Chothia and | | |
| Kabat) | | |
| SEQ ID NO: | HCDR2 | AIYPGNGDTSYNPKFKG |
| 2044 (Combined | | |
| Chothia and | | |
| Kabat) | | |
| SEQ ID NO: | HCDR3 | SYFYGSSSWYFDV |
| 2045 (Combined | | |
| Chothia and | | |
| Kabat) | | |
| SEQ ID NO: | VH | QVQLVQSGAEVKKPGASVKVSCKASGYTFTSYNM |
| 2052 | | HWVRQAPGQGLEWMGAIYPGNGDTSYNPKFKGR |
| | | VTMTADKSTRTAYMELSSLRSEDTAVYYCARSYF |
| | | YGSSSWYFDVWGQGTTVTVSS |
| SEQ ID NO: | DNA VH | CAAGTGCAGCTCGTCCAGTCCGGTGCAGAAGTC |
| 2053 | | AAGAAACCCGGTGCTTCAGTGAAAGTGTCCTGC |
| | | AAGGCCTCCGGTTACACCTTCACCTCCTACAACA |
| | | TGCACTGGGTCCGCCAAGCCCCGGGCCAGGGAC |
| | | TCGAATGGATGGGAGCCATCTACCCTGGCAACG |
| | | GGGACACCTCATACAACCCTAAGTTCAAGGGCA |
| | | GAGTGACCATGACTGCGGACAAGTCCACTAGAA |
| | | CAGCGTACATGGAGCTGAGCAGCCTGCGGTCCG |
| | | AGGATACTGCCGTGTACTACTGCGCCCGCTCCTA |
| | | CTTCTACGGAAGCTCGTCGTGGTACTTCGATGTC |
| | | TGGGGACAGGGCACCACTGTGACTGTGTCCTCC |
| SEQ ID NO: | LCDR1 | RASSSVSSMH |
| 2054 (Kabat) | | |
| SEQ ID NO: | LCDR2 | ATSNLAS |
| 2031 (Kabat) | | |
| SEQ ID NO: | LCDR3 | QQWIFNPPT |
| 2055 (Kabat) | | |
| SEQ ID NO: | LCDR1 | SSSVSS |
| 2056 (Chothia) | | |
| SEQ ID NO: | LCDR2 | ATS |
| 2034 (Chothia) | | |
| SEQ ID NO: | LCDR3 | WIFNPP |
| 2057 (Chothia) | | |
| SEQ ID NO: | LCDR1 | SSVSS |
| 2036 (IMGT) | | |
| SEQ ID NO: | LCDR2 | ATS |
| 2034 (IMGT) | | |
| SEQ ID NO: | LCDR3 | QQWIFNPPT |
| 2055 (IMGT) | | |
| SEQ ID NO: | LCDR1 | RASSSVSSMH |
| 2054 (Combined | | |
| Chothia and | | |
| Kabat) | | |
| SEQ ID NO: | LCDR2 | ATSNLAS |
| 2031 (Combined | | |
| Chothia and | | |
| Kabat) | | |
| SEQ ID NO: | LCDR3 | QQWIFNPPT |
| 2055 | | |
| (Combined | | |
| Chothia and | | |
| Kabat) | | |
| SEQ ID NO: | VL | EIVLTQSPATLSLSPGERATLSCRASSSVSSMHWYQ |
| 2058 | | QKPGQAPRPLIFATSNLASGIPARFSGSGSGTDYTLT |
| | | ISSLEPEDAAVYYCQQWIFNPPTFGGGTKVEIK |
| SEQ ID NO: | DNA VL | GAAATTGTGCTGACTCAGAGCCCCGCCACCCTGA |
| 2059 | | GCTTGTCCCCCGGGGAAAGGGCAACGCTGTCAT |
| | | GCCGCGCCTCGTCATCCGTGTCCTCCATGCATTG |
| | | GTACCAGCAGAAGCCGGGACAGGCCCCTCGGCC |
| | | GCTGATCTTCGCCACCTCCAATCTCGCTTCCGGC |
| | | ATTCCGGCCCGGTTCTCGGGAAGCGGGTCGGGG |
| | | ACCGACTATACCCTGACCATCTCTAGCCTTGAAC |
| | | CTGAGGACGCCGCGGTGTACTATTGTCAACAGTG |
| | | GATCTTTAACCCCCCAACCTTCGGTGGAGGCACC |
| | | AAAGTGGAGATTAAG |
| SEQ ID NO: | Linker | GGGGSGGGGSGGGGSGGGGS |
| 1010 | | |
| SEQ ID NO: | scFv (VH- | QVQLVQSGAEVKKPGASVKVSCKASGYTFTSYNM |
| 2060 | linker-VL) | HWVRQAPGQGLEWMGAIYPGNGDTSYNPKFKGR |
| | | VTMTADKSTRTAYMELSSLRSEDTAVYYCARSYF |
| | | YGSSSWYFDVWGQGTTVTVSSGGGGSGGGGSGG |
| | | GGSGGGGSEIVLTQSPATLSLSPGERATLSCRASSS |
| | | VSSMHWYQQKPGQAPRPLIFATSNLASGIPARFSGS |
| | | GSGTDYTLTISSLEPEDAAVYYCQQWIFNPPTFGGG |
| | | TKVEIK |
| SEQ ID NO: | DNA scFv | CAAGTGCAGCTCGTCCAGTCCGGTGCAGAAGTCAAG |
| 2061 | (VH-linker- | AAACCCGGTGCTTCAGTGAAAGTGTCCTGCAAGGCCT |
| | VL) | CCGGTTACACCTTCACCTCCTACAACATGCACTGGGT |
| | | CCGCCAAGCCCCGGGCCAGGGACTCGAATGGATGGG |
| | | AGCCATCTACCCTGGCAACGGGGACACCTCATACAA |
| | | CCCTAAGTTCAAGGGCAGAGTGACCATGACTGCGGA |
| | | CAAGTCCACTAGAACAGCGTACATGGAGCTGAGCAG |
| | | CCTGCGGTCCGAGGATACTGCCGTGTACTACTGCGCC |
| | | CGCTCCTACTTCTACGGAAGCTCGTCGTGGTACTTCG |
| | | ATGTCTGGGGACAGGGCACCACTGTGACTGTGTCCTC |
| | | CGGTGGCGGAGGCTCGGGCGGAGGCGGAAGCGGCGG |
| | | CGGGGGATCGGGAGGAGGAGGGTCCGAAATTGTGCT |
| | | GACTCAGAGCCCCGCCACCCTGAGCTTGTCCCCCGGG |
| | | GAAAGGGCAACGCTGTCATGCCGCGCCTCGTCATCCG |
| | | TGTCCTCCATGCATTGGTACCAGCAGAAGCCGGGACA |
| | | GGCCCCTCGGCCGCTGATCTTCGCCACCTCCAATCTC |
| | | GCTTCCGGCATTCCGGCCCGGTTCTCGGGAAGCGGGT |
| | | CGGGGACCGACTATACCCTGACCATCTCTAGCCTTGA |
| | | ACCTGAGGACGCCGCGGTGTACTATTGTCAACAGTGG |
| | | ATCTTTAACCCCCCAACCTTCGGTGGAGGCACCAAAG |
| | | TGGAGATTAAG |
| SEQ ID NO: | Full CAR | MALPVTALLLPLALLLHAARPQVQLVQSGAEVKK |
| 2062 | amino acid | PGASVKVSCKASGYTFTSYNMHWVRQAPGQGLE |
| | sequence | WMGAIYPGNGDTSYNPKFKGRVTMTADKSTRTAY |
| | | MELSSLRSEDTAVYYCARSYFYGSSSWYFDVWGQ |
| | | GTTVTVSSGGGGSGGGGSGGGGSGGGGSEIVLTQS |
| | | PATLSLSPGERATLSCRASSSVSSMHWYQQKPGQA |
| | | PRPLIFATSNLASGIPARFSGSGSGTDYTLTISSLEPE |
| | | DAAVYYCQQWIFNPPTFGGGTKVEIKTTTPAPRPPT |
| | | PAPTIASQPLSLRPEACRPAAGGAVHTRGLDFACDI |
| | | YIWAPLAGTCGVLLLSLVITLYCKRGRKKLLYIFKQ |
| | | PFMRPVQTTQEEDGCSCRFPEEEEGGCELRVKFSRS |
| | | ADAPAYQQGQNQLYNELNLGRREEYDVLDKRRG |
| | | RDPEMGGKPRRKNPQEGLYNELQKDKMAEAYSEI |
| | | GMKGERRRGKGHDGLYQGLSTATKDTYDALHMQ |
| | | ALPPR |
| SEQ ID NO: | Full CAR | ATGGCCCTCCCTGTCACCGCCCTGCTGCTTCCGC |
| 2063 | nucleic acid | TGGCTCTTCTGCTCCACGCCGCTCGGCCCCAAGT |
| | sequence | GCAGCTCGTCCAGTCCGGTGCAGAAGTCAAGAA |
| | | ACCCGGTGCTTCAGTGAAAGTGTCCTGCAAGGCC |
| | | TCCGGTTACACCTTCACCTCCTACAACATGCACT |
| | | GGGTCCGCCAAGCCCCGGGCCAGGGACTCGAAT |
| | | GGATGGGAGCCATCTACCCTGGCAACGGGGACA |
| | | CCTCATACAACCCTAAGTTCAAGGGCAGAGTGA |
| | | CCATGACTGCGGACAAGTCCACTAGAACAGCGT |
| | | ACATGGAGCTGAGCAGCCTGCGGTCCGAGGATA |
| | | CTGCCGTGTACTACTGCGCCCGCTCCTACTTCTA |
| | | CGGAAGCTCGTCGTGGTACTTCGATGTCTGGGGA |
| | | CAGGGCACCACTGTGACTGTGTCCTCCGGTGGCG |
| | | GAGGCTCGGGCGGAGGCGGAAGCGGCGGCGGG |
| | | GGATCGGGAGGAGGAGGGTCCGAAATTGTGCTG |
| | | ACTCAGAGCCCCGCCACCCTGAGCTTGTCCCCCG |
| | | GGGAAAGGGCAACGCTGTCATGCCGCGCCTCGT |
| | | CATCCGTGTCCTCCATGCATTGGTACCAGCAGAA |
| | | GCCGGGACAGGCCCCTCGGCCGCTGATCTTCGCC |
| | | ACCTCCAATCTCGCTTCCGGCATTCCGGCCCGGT |
| | | TCTCGGGAAGCGGGTCGGGGACCGACTATACCC |
| | | TGACCATCTCTAGCCTTGAACCTGAGGACGCCGC |
| | | GGTGTACTATTGTCAACAGTGGATCTTTAACCCC |
| | | CCAACCTTCGGTGGAGGCACCAAAGTGGAGATT |
| | | AAGACCACTACCCCAGCACCGAGGCCACCCACC |
| | | CCGGCTCCTACCATCGCCTCCCAGCCTCTGTCCC |
| | | TGCGTCCGGAGGCATGTAGACCCGCAGCTGGTG |
| | | GGGCCGTGCATACCCGGGGTCTTGACTTCGCCTG |
| | | CGATATCTACATTTGGGCCCCTCTGGCTGGTACT |
| | | TGCGGGGTCCTGCTGCTTTCACTCGTGATCACTC |
| | | TTTACTGTAAGCGCGGTCGGAAGAAGCTGCTGTA |
| | | CATCTTTAAGCAACCCTTCATGAGGCCTGTGCAG |
| | | ACTACTCAAGAGGAGGACGGCTGTTCATGCCGG |
| | | TTCCCAGAGGAGGAGGAAGGCGGCTGCGAACTG |
| | | CGCGTGAAATTCAGCCGCAGCGCAGATGCTCCA |
| | | GCCTACCAGCAGGGGCAGAACCAGCTCTACAAC |
| | | GAACTCAATCTTGGTCGGAGAGAGGAGTACGAC |
| | | GTGCTGGACAAGCGGAGAGGACGGGACCCAGAA |
| | | ATGGGCGGGAAGCCGCGCAGAAAGAATCCCCAA |
| | | GAGGGCCTGTACAACGAGCTCCAAAAGGATAAG |
| | | ATGGCAGAAGCCTATAGCGAGATTGGTATGAAA |
| | | GGGGAACGCAGAAGAGGCAAAGGCCACGACGG |
| | | ACTGTACCAGGGACTCAGCACCGCCACCAAGGA |
| | | CACCTATGACGCTCTTCACATGCAGGCCCTGCCG |
| | | CCTCGG |
| CD20-C2H1 | | |
| SEQ ID NO: | HCDR1 | NYWMH |
| 2064 | | |
| (Kabat) | | |
| SEQ ID NO: | HCDR2 | FITPTTGYPEYNQKFKD |
| 2065 (Kabat) | | |
| SEQ ID NO: | HCDR3 | RKVGKGVYYALDY |
| 2066 (Kabat) | | |
| SEQ ID NO: | HCDR1 | GYTFTNY |
| 2022 (Chothia) | | |
| SEQ ID NO: | HCDR2 | TPTTGY |
| 2067 (Chothia) | | |
| SEQ ID NO: | HCDR3 | RKVGKGVYYALDY |
| 2066 (Chothia) | | |
| SEQ ID NO: | HCDR1 | GYTFTNYW |
| 2068 (IMGT) | | |
| SEQ ID NO: | HCDR2 | ITPTTGYP |
| 2069 (IMGT) | | |
| SEQ ID NO: | HCDR3 | ARRKVGKGVYYALDY |
| 2070 (IMGT) | | |
| SEQ ID NO: | HCDR1 | GYTFTNYWMH |
| 2071 (Combined | | |
| Chothia and | | |
| Kabat) | | |
| SEQ ID NO: | HCDR2 | FITPTTGYPEYNQKFKD |
| 2065 (Combined | | |
| Chothia and | | |
| Kabat) | | |
| SEQ ID NO: | HCDR3 | RKVGKGVYYALDY |
| 2066 (Combined | | |
| Chothia and | | |
| Kabat) | | |
| SEQ ID NO: | VH | QVQLVQSGAEVKKPGASVKVSCKASGYTFTNYW |
| 2072 | | MHWVRQAPGQGLEWMGFITPTTGYPEYNQKFKD |
| | | RVTMTADKSTSTAYMELSSLRSEDTAVYYCARRK |
| | | VGKGVYYALDYWGQGTTVTVSS |
| SEQ ID NO: | DNA VH | CAAGTGCAACTCGTCCAGTCCGGTGCAGAAGTC |
| 2073 | | AAGAAACCAGGCGCATCCGTGAAAGTCTCCTGC |
| | | AAAGCCTCCGGCTACACATTCACTAACTATTGGA |
| | | TGCATTGGGTGCGCCAGGCCCCGGGACAGGGGC |
| | | TGGAGTGGATGGGGTTCATTACCCCTACCACCGG |
| | | CTACCCTGAGTACAACCAGAAGTTCAAGGATAG |
| | | GGTCACCATGACCGCTGACAAGTCCACCTCCACC |
| | | GCGTACATGGAACTGTCATCGCTCCGGTCCGAGG |
| | | ATACCGCGGTGTACTACTGCGCCCGGAGAAAAG |
| | | TCGGAAAGGGAGTGTATTACGCCTTGGACTACTG |
| | | GGGACAGGGGACTACCGTGACCGTGTCGAGC |
| SEQ ID NO: | LCDR1 | RASGNIHNYLA |
| 2074 (Kabat) | | |
| SEQ ID NO: | LCDR2 | NTKTLAD |
| 2075 (Kabat) | | |
| SEQ ID NO: | LCDR3 | QHFWSSPWT |
| 2076 (Kabat) | | |
| SEQ ID NO: | LCDR1 | SGNIHNY |
| 2077 (Chothia) | | |
| SEQ ID NO: | LCDR2 | NTK |
| 2078 (Chothia) | | |
| SEQ ID NO: | LCDR3 | FWSSPW |
| 2079 (Chothia) | | |
| SEQ ID NO: | LCDR1 | GNIHNY |
| 2080 (IMGT) | | |
| SEQ ID NO: | LCDR2 | NTK |
| 2078 (IMGT) | | |
| SEQ ID NO: | LCDR3 | QHFWSSPWT |
| 2076 (IMGT) | | |
| SEQ ID NO: | LCDR1 | RASGNIHNYLA |
| 2074 (Combined | | |
| Chothia and | | |
| Kabat) | | |
| SEQ ID NO: | LCDR2 | NTKTLAD |
| 2075 (Combined | | |
| Chothia and | | |
| Kabat) | | |
| SEQ ID NO: | LCDR3 | QHFWSSPWT |
| 2076 (Combined | | |
| Chothia and | | |
| Kabat) | | |
| SEQ ID NO: | VL | DIQMTQSPSSLSASVGDRVTITCRASGNIHNYLAW |
| 2081 | | YQQKPGKVPKLLIYNTKTLADGVPSRFSGSGSGTD |
| | | YTLTISSLQPEDVATYYCQHFWSSPWTFGGGTKVE |
| | | IK |
| SEQ ID NO: | DNA VL | GACATCCAGATGACCCAGTCCCCGTCAAGCCTTA |
| 2082 | | GCGCCTCCGTGGGCGACCGCGTGACCATTACTTG |
| | | TCGGGCGTCGGGAAACATCCACAACTACCTCGC |
| | | CTGGTACCAGCAGAAGCCGGGAAAGGTCCCCAA |
| | | GCTGCTGATCTACAATACCAAGACTCTGGCCGAC |
| | | GGAGTGCCTTCCCGCTTTTCCGGTTCGGGAAGCG |
| | | GGACTGACTACACCCTGACTATCTCCTCGCTGCA |
| | | ACCCGAAGATGTGGCTACGTACTACTGCCAGCA |
| | | CTTCTGGTCCTCTCCCTGGACCTTCGGCGGTGGC |
| | | ACTAAGGTCGAGATTAAG |
| SEQ ID NO: | Linker | GGGGSGGGGSGGGGSGGGGS |
| 1010 | | |
| SEQ ID NO: | scFv (VH- | QVQLVQSGAEVKKPGASVKVSCKASGYTFTNYW |
| 2083 | linker-VL) | MHWVRQAPGQGLEWMGFITPTTGYPEYNQKFKD |
| | | RVTMTADKSTSTAYMELSSLRSEDTAVYYCARRK |
| | | VGKGVYYALDYWGQGTTVTVSSGGGGSGGGGSG |
| | | GGGSGGGGSDIQMTQSPSSLSASVGDRVTITCRAS |
| | | GNIHNYLAWYQQKPGKVPKLLIYNTKTLADGVPS |
| | | RFSGSGSGTDYTLTISSLQPEDVATYYCQHFWSSP |
| | | WTFGGGTKVEIK |
| SEQ ID NO: | DNA scFv | CAAGTGCAACTCGTCCAGTCCGGTGCAGAAGTCAAG |
| 2084 | (VH-linker- | AAACCAGGCGCATCCGTGAAAGTCTCCTGCAAAGCC |
| | VL) | TCCGGCTACACATTCACTAACTATTGGATGCATTGGG |
| | | TGCGCCAGGCCCCGGGACAGGGGCTGGAGTGGATGG |
| | | GGTTCATTACCCCTACCACCGGCTACCCTGAGTACAA |
| | | CCAGAAGTTCAAGGATAGGGTCACCATGACCGCTGA |
| | | CAAGTCCACCTCCACCGCGTACATGGAACTGTCATCG |
| | | CTCCGGTCCGAGGATACCGCGGTGTACTACTGCGCCC |
| | | GGAGAAAAGTCGGAAAGGGAGTGTATTACGCCTTGG |
| | | ACTACTGGGGACAGGGGACTACCGTGACCGTGTCGA |
| | | GCGGTGGAGGCGGCTCCGGCGGAGGAGGAAGCGGG |
| | | GGAGGCGGTTCAGGGGGCGGAGGAAGCGACATCCAG |
| | | ATGACCCAGTCCCCGTCAAGCCTTAGCGCCTCCGTGG |
| | | GCGACCGCGTGACCATTACTTGTCGGGCGTCGGGAA |
| | | ACATCCACAACTACCTCGCCTGGTACCAGCAGAAGCC |
| | | GGGAAAGGTCCCCAAGCTGCTGATCTACAATACCAA |
| | | GACTCTGGCCGACGGAGTGCCTTCCCGCTTTTCCGGT |
| | | TCGGGAAGCGGGACTGACTACACCCTGACTATCTCCT |
| | | CGCTGCAACCCGAAGATGTGGCTACGTACTACTGCCA |
| | | GCACTTCTGGTCCTCTCCCTGGACCTTCGGCGGTGGC |
| | | ACTAAGGTCGAGATTAAG |
| SEQ ID NO: | Full CAR | MALPVTALLLPLALLLHAARPQVQLVQSGAEVKK |
| 2085 | amino acid | PGASVKVSCKASGYTFTNYWMHWVRQAPGQGLE |
| | sequence | WMGFITPTTGYPEYNQKFKDRVTMTADKSTSTAY |
| | | MELSSLRSEDTAVYYCARRKVGKGVYYALDYWG |
| | | QGTTVTVSSGGGGSGGGGSGGGGSGGGGSDIQMT |
| | | QSPSSLSASVGDRVTITCRASGNIHNYLAWYQQKP |
| | | GKVPKLLIYNTKTLADGVPSRFSGSGSGTDYTLTIS |
| | | SLQPEDVATYYCQHFWSSPWTFGGGTKVEIKTTTP |
| | | APRPPTPAPTIASQPLSLRPEACRPAAGGAVHTRGL |
| | | DFACDIYIWAPLAGTCGVLLLSLVITLYCKRGRKK |
| | | LLYIFKQPFMRPVQTTQEEDGCSCRFPEEEEGGCEL |
| | | RVKFSRSADAPAYQQGQNQLYNELNLGRREEYDV |
| | | LDKRRGRDPEMGGKPRRKNPQEGLYNELQKDKM |
| | | AEAYSEIGMKGERRRGKGHDGLYQGLSTATKDTY |
| | | DALHMQALPPR |
| SEQ ID NO: | Full CAR | ATGGCCCTCCCTGTCACCGCCCTGCTGCTTCCGC |
| 2086 | nucleic acid | TGGCTCTTCTGCTCCACGCCGCTCGGCCCCAAGT |
| | sequence | GCAACTCGTCCAGTCCGGTGCAGAAGTCAAGAA |
| | | ACCAGGCGCATCCGTGAAAGTCTCCTGCAAAGC |
| | | CTCCGGCTACACATTCACTAACTATTGGATGCAT |
| | | TGGGTGCGCCAGGCCCCGGGACAGGGGCTGGAG |
| | | TGGATGGGGTTCATTACCCCTACCACCGGCTACC |
| | | CTGAGTACAACCAGAAGTTCAAGGATAGGGTCA |
| | | CCATGACCGCTGACAAGTCCACCTCCACCGCGTA |
| | | CATGGAACTGTCATCGCTCCGGTCCGAGGATACC |
| | | GCGGTGTACTACTGCGCCCGGAGAAAAGTCGGA |
| | | AAGGGAGTGTATTACGCCTTGGACTACTGGGGA |
| | | CAGGGGACTACCGTGACCGTGTCGAGCGGTGGA |
| | | GGCGGCTCCGGCGGAGGAGGAAGCGGGGGAGG |
| | | CGGTTCAGGGGGCGGAGGAAGCGACATCCAGAT |
| | | GACCCAGTCCCCGTCAAGCCTTAGCGCCTCCGTG |
| | | GGCGACCGCGTGACCATTACTTGTCGGGCGTCGG |
| | | GAAACATCCACAACTACCTCGCCTGGTACCAGC |
| | | AGAAGCCGGGAAAGGTCCCCAAGCTGCTGATCT |
| | | ACAATACCAAGACTCTGGCCGACGGAGTGCCTT |
| | | CCCGCTTTTCCGGTTCGGGAAGCGGGACTGACTA |
| | | CACCCTGACTATCTCCTCGCTGCAACCCGAAGAT |
| | | GTGGCTACGTACTACTGCCAGCACTTCTGGTCCT |
| | | CTCCCTGGACCTTCGGCGGTGGCACTAAGGTCGA |
| | | GATTAAGACCACTACCCCAGCACCGAGGCCACC |
| | | CACCCCGGCTCCTACCATCGCCTCCCAGCCTCTG |
| | | TCCCTGCGTCCGGAGGCATGTAGACCCGCAGCTG |
| | | GTGGGGCCGTGCATACCCGGGGTCTTGACTTCGC |
| | | CTGCGATATCTACATTTGGGCCCCTCTGGCTGGT |
| | | ACTTGCGGGGTCCTGCTGCTTTCACTCGTGATCA |
| | | CTCTTTACTGTAAGCGCGGTCGGAAGAAGCTGCT |
| | | GTACATCTTTAAGCAACCCTTCATGAGGCCTGTG |
| | | CAGACTACTCAAGAGGAGGACGGCTGTTCATGC |
| | | CGGTTCCCAGAGGAGGAGGAAGGCGGCTGCGAA |
| | | CTGCGCGTGAAATTCAGCCGCAGCGCAGATGCT |
| | | CCAGCCTACCAGCAGGGGCAGAACCAGCTCTAC |
| | | AACGAACTCAATCTTGGTCGGAGAGAGGAGTAC |
| | | GACGTGCTGGACAAGCGGAGAGGACGGGACCCA |
| | | GAAATGGGCGGGAAGCCGCGCAGAAAGAATCCC |
| | | CAAGAGGGCCTGTACAACGAGCTCCAAAAGGAT |
| | | AAGATGGCAGAAGCCTATAGCGAGATTGGTATG |
| | | AAAGGGGAACGCAGAAGAGGCAAAGGCCACGA |
| | | CGGACTGTACCAGGGACTCAGCACCGCCACCAA |
| | | GGACACCTATGACGCTCTTCACATGCAGGCCCTG |
| | | CCGCCTCGG |
| CD20-C2H2 | | |
| SEQ ID NO: | HCDR1 | NYWMH |
| 2064 (Kabat) | | |
| SEQ ID NO: | HCDR2 | FITPTTGYPEYNQKFKD |
| 2065 (Kabat) | | |
| SEQ ID NO: | HCDR3 | RKVGKGVYYALDY |
| 2066 (Kabat) | | |
| SEQ ID NO: | HCDR1 | GYTFTNY |
| 2022 (Chothia) | | |
| SEQ ID NO: | HCDR2 | TPTTGY |
| 2067 (Chothia) | | |
| SEQ ID NO: | HCDR3 | RKVGKGVYYALDY |
| 2066 (Chothia) | | |
| SEQ ID NO: | HCDR1 | GYTFTNYW |
| 2068 (IMGT) | | |
| SEQ ID NO: | HCDR2 | ITPTTGYP |
| 2069 (IMGT) | | |
| SEQ ID NO: | HCDR3 | ARRKVGKGVYYALDY |
| 2070 (IMGT) | | |
| SEQ ID NO: | HCDR1 | GYTFTNYWMH |
| 2071 (Combined | | |
| Chothia and | | |
| Kabat) | | |
| SEQ ID NO: | HCDR2 | FITPTTGYPEYNQKFKD |
| 2065 (Combined | | |
| Chothia and | | |
| Kabat) | | |
| SEQ ID NO: | HCDR3 | RKVGKGVYYALDY |
| 2066 (Combined | | |
| Chothia and | | |
| Kabat) | | |
| SEQ ID NO: | VH | QVQLVQSGAEVKKPGSSVKVSCKASGYTFTNYW |
| 2087 | | MHWVRQAPGQGLEWMGFITPTTGYPEYNQKFKD |
| | | RVTITADKSTSTAYMELSSLRSEDTAVYYCARRKV |
| | | GKGVYYALDYWGQGTTVTVSS |
| SEQ ID NO: | DNA VH | CAAGTCCAACTCGTCCAATCAGGAGCAGAAGTC |
| 2088 | | AAGAAGCCCGGAAGCTCTGTCAAAGTGTCCTGC |
| | | AAGGCCTCCGGTTACACCTTCACCAACTATTGGA |
| | | TGCACTGGGTCAGACAGGCCCCGGGACAGGGCT |
| | | TGGAATGGATGGGTTTCATCACTCCAACCACCGG |
| | | TTACCCGGAGTACAACCAGAAGTTTAAGGACCG |
| | | CGTGACCATTACTGCCGACAAGTCCACGAGCAC |
| | | CGCTTACATGGAACTTAGCAGCCTGCGGTCCGAG |
| | | GACACTGCCGTGTATTACTGCGCGCGGAGGAAG |
| | | GTCGGAAAGGGAGTGTACTACGCACTGGACTAC |
| | | TGGGGCCAGGGAACCACCGTGACTGTGTCCTCC |
| SEQ ID NO: | LCDR1 | RASGNIHNYLA |
| 2074 (Kabat) | | |
| SEQ ID NO: | LCDR2 | NTKTLAD |
| 2075 (Kabat) | | |
| SEQ ID NO: | LCDR3 | QHFWSSPWT |
| 2076 (Kabat) | | |
| SEQ ID NO: | LCDR1 | SGNIHNY |
| 2077 (Chothia) | | |
| SEQ ID NO: | LCDR2 | NTK |
| 2078 (Chothia) | | |
| SEQ ID NO: | LCDR3 | FWSSPW |
| 2079 (Chothia) | | |
| SEQ ID NO: | LCDR1 | GNIHNY |
| 2080 (IMGT) | | |
| SEQ ID NO: | LCDR2 | NTK |
| 2078 (IMGT) | | |
| SEQ ID NO: | LCDR3 | QHFWSSPWT |
| 2076 (IMGT) | | |
| SEQ ID NO: | LCDR1 | RASGNIHNYLA |
| 2074 (Combined | | |
| Chothia and | | |
| Kabat) | | |
| SEQ ID NO: | LCDR2 | NTKTLAD |
| 2075(Combined | | |
| Chothia and | | |
| Kabat) | | |
| SEQ ID NO: | LCDR3 | QHFWSSPWT |
| 2076 (Combined | | |
| Chothia and | | |
| Kabat) | | |
| SEQ ID NO: | VL | DIQMTQSPSSLSASVGDRVTITCRASGNIHNYLAW |
| 2081 | | YQQKPGKVPKLLIYNTKTLADGVPSRFSGSGSGTD |
| | | YTLTISSLQPEDVATYYCQHFWSSPWTFGGGTKVE |
| | | IK |
| SEQ ID NO: | DNA VL | GATATTCAGATGACCCAGTCCCCTTCATCCCTGA |
| 2089 | | GCGCCTCAGTGGGCGATAGAGTGACCATCACTT |
| | | GTCGCGCCTCGGGCAATATCCACAACTACCTCGC |
| | | CTGGTACCAGCAGAAGCCGGGAAAAGTGCCTAA |
| | | GCTGCTGATCTACAACACTAAGACCCTGGCGGAT |
| | | GGAGTGCCCAGCCGGTTCTCCGGCTCCGGCAGC |
| | | GGCACAGACTACACCCTCACCATCTCCTCGCTGC |
| | | AACCAGAGGACGTGGCTACCTACTACTGCCAGC |
| | | ATTTCTGGTCGTCCCCCTGGACTTTCGGAGGGGG |
| | | GACCAAAGTGGAGATTAAG |
| SEQ ID NO: | Linker | GGGGSGGGGSGGGGSGGGGS |
| 1010 | | |
| SEQ ID NO: | scFv (VH- | QVQLVQSGAEVKKPGSSVKVSCKASGYTFTNYW |
| 2090 | linker-VL) | MHWVRQAPGQGLEWMGFITPTTGYPEYNQKFKD |
| | | RVTITADKSTSTAYMELSSLRSEDTAVYYCARRKV |
| | | GKGVYYALDYWGQGTTVTVSSGGGGSGGGGSGG |
| | | GGSGGGGSDIQMTQSPSSLSASVGDRVTITCRASG |
| | | NIHNYLAWYQQKPGKVPKLLIYNTKTLADGVPSRF |
| | | SGSGSGTDYTLTISSLQPEDVATYYCQHFWSSPWT |
| | | FGGGTKVEIK |
| SEQ ID NO: | DNA scFv | CAAGTCCAACTCGTCCAATCAGGAGCAGAAGTCAAG |
| 2091 | (VH-linker- | AAGCCCGGAAGCTCTGTCAAAGTGTCCTGCAAGGCCT |
| | VL) | CCGGTTACACCTTCACCAACTATTGGATGCACTGGGT |
| | | CAGACAGGCCCCGGGACAGGGCTTGGAATGGATGGG |
| | | TTTCATCACTCCAACCACCGGTTACCCGGAGTACAAC |
| | | CAGAAGTTTAAGGACCGCGTGACCATTACTGCCGAC |
| | | AAGTCCACGAGCACCGCTTACATGGAACTTAGCAGC |
| | | CTGCGGTCCGAGGACACTGCCGTGTATTACTGCGCGC |
| | | GGAGGAAGGTCGGAAAGGGAGTGTACTACGCACTGG |
| | | ACTACTGGGGCCAGGGAACCACCGTGACTGTGTCCTC |
| | | CGGTGGCGGAGGGTCGGGAGGGGGGGGCTCGGGAG |
| | | GAGGAGGGTCCGGGGGCGGTGGCTCAGATATTCAGA |
| | | TGACCCAGTCCCCTTCATCCCTGAGCGCCTCAGTGGG |
| | | CGATAGAGTGACCATCACTTGTCGCGCCTCGGGCAAT |
| | | ATCCACAACTACCTCGCCTGGTACCAGCAGAAGCCG |
| | | GGAAAAGTGCCTAAGCTGCTGATCTACAACACTAAG |
| | | ACCCTGGCGGATGGAGTGCCCAGCCGGTTCTCCGGCT |
| | | CCGGCAGCGGCACAGACTACACCCTCACCATCTCCTC |
| | | GCTGCAACCAGAGGACGTGGCTACCTACTACTGCCA |
| | | GCATTTCTGGTCGTCCCCCTGGACTTTCGGAGGGGGG |
| | | ACCAAAGTGGAGATTAAG |
| SEQ ID NO: | Full CAR | MALPVTALLLPLALLLHAARPQVQLVQSGAEVKK |
| 2092 | amino acid | PGSSVKVSCKASGYTFTNYWMHWVRQAPGQGLE |
| | sequence | WMGFITPTTGYPEYNQKFKDRVTITADKSTSTAYM |
| | | ELSSLRSEDTAVYYCARRKVGKGVYYALDYWGQ |
| | | GTTVTVSSGGGGSGGGGSGGGGSGGGGSDIQMTQ |
| | | SPSSLSASVGDRVTITCRASGNIHNYLAWYQQKPG |
| | | KVPKLLIYNTKTLADGVPSRFSGSGSGTDYTLTISS |
| | | LQPEDVATYYCQHFWSSPWTFGGGTKVEIKTTTPA |
| | | PRPPTPAPTIASQPLSLRPEACRPAAGGAVHTRGLD |
| | | FACDIYIWAPLAGTCGVLLLSLVITLYCKRGRKKLL |
| | | YIFKQPFMRPVQTTQEEDGCSCRFPEEEEGGCELRV |
| | | KFSRSADAPAYQQGQNQLYNELNLGRREEYDVLD |
| | | KRRGRDPEMGGKPRRKNPQEGLYNELQKDKMAE |
| | | AYSEIGMKGERRRGKGHDGLYQGLSTATKDTYDA |
| | | LHMQALPPR |
| SEQ ID NO: | Full CAR | ATGGCCCTCCCTGTCACCGCCCTGCTGCTTCCGC |
| 2093 | nucleic acid | TGGCTCTTCTGCTCCACGCCGCTCGGCCCCAAGT |
| | sequence | CCAACTCGTCCAATCAGGAGCAGAAGTCAAGAA |
| | | GCCCGGAAGCTCTGTCAAAGTGTCCTGCAAGGC |
| | | CTCCGGTTACACCTTCACCAACTATTGGATGCAC |
| | | TGGGTCAGACAGGCCCCGGGACAGGGCTTGGAA |
| | | TGGATGGGTTTCATCACTCCAACCACCGGTTACC |
| | | CGGAGTACAACCAGAAGTTTAAGGACCGCGTGA |
| | | CCATTACTGCCGACAAGTCCACGAGCACCGCTTA |
| | | CATGGAACTTAGCAGCCTGCGGTCCGAGGACAC |
| | | TGCCGTGTATTACTGCGCGCGGAGGAAGGTCGG |
| | | AAAGGGAGTGTACTACGCACTGGACTACTGGGG |
| | | CCAGGGAACCACCGTGACTGTGTCCTCCGGTGGC |
| | | GGAGGGTCGGGAGGGGGGGGCTCGGGAGGAGG |
| | | AGGGTCCGGGGGCGGTGGCTCAGATATTCAGAT |
| | | GACCCAGTCCCCTTCATCCCTGAGCGCCTCAGTG |
| | | GGCGATAGAGTGACCATCACTTGTCGCGCCTCGG |
| | | GCAATATCCACAACTACCTCGCCTGGTACCAGCA |
| | | GAAGCCGGGAAAAGTGCCTAAGCTGCTGATCTA |
| | | CAACACTAAGACCCTGGCGGATGGAGTGCCCAG |
| | | CCGGTTCTCCGGCTCCGGCAGCGGCACAGACTAC |
| | | ACCCTCACCATCTCCTCGCTGCAACCAGAGGACG |
| | | TGGCTACCTACTACTGCCAGCATTTCTGGTCGTC |
| | | CCCCTGGACTTTCGGAGGGGGGACCAAAGTGGA |
| | | GATTAAGACCACTACCCCAGCACCGAGGCCACC |
| | | CACCCCGGCTCCTACCATCGCCTCCCAGCCTCTG |
| | | TCCCTGCGTCCGGAGGCATGTAGACCCGCAGCTG |
| | | GTGGGGCCGTGCATACCCGGGGTCTTGACTTCGC |
| | | CTGCGATATCTACATTTGGGCCCCTCTGGCTGGT |
| | | ACTTGCGGGGTCCTGCTGCTTTCACTCGTGATCA |
| | | CTCTTTACTGTAAGCGCGGTCGGAAGAAGCTGCT |
| | | GTACATCTTTAAGCAACCCTTCATGAGGCCTGTG |
| | | CAGACTACTCAAGAGGAGGACGGCTGTTCATGC |
| | | CGGTTCCCAGAGGAGGAGGAAGGCGGCTGCGAA |
| | | CTGCGCGTGAAATTCAGCCGCAGCGCAGATGCT |
| | | CCAGCCTACCAGCAGGGGCAGAACCAGCTCTAC |
| | | AACGAACTCAATCTTGGTCGGAGAGAGGAGTAC |
| | | GACGTGCTGGACAAGCGGAGAGGACGGGACCCA |
| | | GAAATGGGCGGGAAGCCGCGCAGAAAGAATCCC |
| | | CAAGAGGGCCTGTACAACGAGCTCCAAAAGGAT |
| | | AAGATGGCAGAAGCCTATAGCGAGATTGGTATG |
| | | AAAGGGGAACGCAGAAGAGGCAAAGGCCACGA |
| | | CGGACTGTACCAGGGACTCAGCACCGCCACCAA |
| | | GGACACCTATGACGCTCTTCACATGCAGGCCCTG |
| | | CCGCCTCGG |
| CD20-C2H3 | | |
| SEQ ID NO: | HCDR1 | NYWMH |
| 2064 (Kabat) | | |
| SEQ ID NO: | HCDR2 | FITPTTGYPEYNQKFKD |
| 2065 (Kabat) | | |
| SEQ ID NO: | HCDR3 | RKVGKGVYYALDY |
| 2066 (Kabat) | | |
| SEQ ID NO: | HCDR1 | GYTFTNY |
| 2022 (Chothia) | | |
| SEQ ID NO: | HCDR2 | TPTTGY |
| 2067 (Chothia) | | |
| SEQ ID NO: | HCDR3 | RKVGKGVYYALDY |
| 2066 (Chothia) | | |
| SEQ ID NO: | HCDR1 | GYTFTNYW |
| 2068 (IMGT) | | |
| SEQ ID NO: | HCDR2 | ITPTTGYP |
| 2069 (IMGT) | | |
| SEQ ID NO: | HCDR3 | ARRKVGKGVYYALDY |
| 2070 (IMGT) | | |
| SEQ ID NO: | HCDR1 | GYTFTNYWMH |
| 2071 (Combined | | |
| Chothia and | | |
| Kabat) | | |
| SEQ ID NO: | HCDR2 | FITPTTGYPEYNQKFKD |
| 2065 (Combined | | |
| Chothia and | | |
| Kabat) | | |
| SEQ ID NO: | HCDR3 | RKVGKGVYYALDY |
| 2066 (Combined | | |
| Chothia and | | |
| Kabat) | | |
| SEQ ID NO: | VH | QVQLVQSGAEVKKPGASVKVSCKASGYTFTNYW |
| 2072 | | MHWVRQAPGQGLEWMGFITPTTGYPEYNQKFKD |
| | | RVTMTADKSTSTAYMELSSLRSEDTAVYYCARRK |
| | | VGKGVYYALDYWGQGTTVTVSS |
| SEQ ID NO: | DNA VH | CAAGTCCAACTCGTCCAGTCCGGTGCAGAAGTC |
| 2094 | | AAGAAACCCGGAGCTTCCGTGAAAGTGTCCTGC |
| | | AAAGCCTCCGGTTACACCTTTACGAACTACTGGA |
| | | TGCATTGGGTGCGCCAGGCCCCGGGACAGGGGC |
| | | TGGAATGGATGGGCTTCATTACCCCCACCACCGG |
| | | ATACCCCGAGTACAATCAGAAGTTCAAGGACCG |
| | | GGTCACCATGACCGCCGACAAGTCAACCTCTACT |
| | | GCTTACATGGAGCTGTCCAGCCTGCGGTCGGAA |
| | | GATACCGCCGTGTATTACTGCGCGAGAAGGAAA |
| | | GTCGGAAAGGGAGTGTACTATGCCCTGGACTAC |
| | | TGGGGACAGGGGACCACTGTGACTGTGTCAAGC |
| SEQ ID NO: | LCDR1 | RASGNIHNYLA |
| 2074 (Kabat) | | |
| SEQ ID NO: | LCDR2 | NTKTLAD |
| 2075 (Kabat) | | |
| SEQ ID NO: | LCDR3 | QHFWSSPWT |
| 2076 (Kabat) | | |
| SEQ ID NO: | LCDR1 | SGNIHNY |
| 2077 (Chothia) | | |
| SEQ ID NO: | LCDR2 | NTK |
| 2078 (Chothia) | | |
| SEQ ID NO: | LCDR3 | FWSSPW |
| 2079 (Chothia) | | |
| SEQ ID NO: | LCDR1 | GNIHNY |
| 2080 (IMGT) | | |
| SEQ ID NO: | LCDR2 | NTK |
| 2078 (IMGT) | | |
| SEQ ID NO: | LCDR3 | QHFWSSPWT |
| 2076 (IMGT) | | |
| SEQ ID NO: | LCDR1 | RASGNIHNYLA |
| 2074 (Combined | | |
| Chothia and | | |
| Kabat) | | |
| SEQ ID NO: | LCDR2 | NTKTLAD |
| 2075 (Combined | | |
| Chothia and | | |
| Kabat) | | |
| SEQ ID NO: | LCDR3 | QHFWSSPWT |
| 2076 (Combined | | |
| Chothia and | | |
| Kabat) | | |
| SEQ ID NO: | VL | AIRMTQSPFSLSASVGDRVTITCRASGNIHNYLAW |
| 2095 | | YQQKPAKAPKLFIYNTKTLADGVPSRFSGSGSGTD |
| | | YTLTISSLQPEDFATYYCQHFWSSPWTFGGGTKVEI |
| | | K |
| SEQ ID NO: | DNA VL | GCGATCCGCATGACCCAGAGCCCGTTCTCCCTGT |
| 2096 | | CCGCGTCCGTGGGGGACCGCGTGACTATCACGT |
| | | GTCGGGCCTCCGGGAACATCCACAACTACCTCGC |
| | | ATGGTACCAGCAGAAGCCGGCCAAGGCCCCTAA |
| | | GTTGTTCATCTACAACACCAAGACTCTTGCCGAC |
| | | GGAGTGCCGTCCCGGTTTAGCGGAAGCGGTTCC |
| | | GGCACCGACTACACCCTGACTATCTCGAGCCTGC |
| | | AACCAGAAGATTTCGCCACTTACTACTGCCAGCA |
| | | CTTCTGGTCGTCCCCTTGGACATTCGGCGGCGGC |
| | | ACCAAGGTCGAGATTAAG |
| SEQ ID NO: | Linker | GGGGSGGGGSGGGGSGGGGS |
| 1010 | | |
| SEQ ID NO: | scFv (VH- | QVQLVQSGAEVKKPGASVKVSCKASGYTFTNYW |
| 2097 | linker-VL) | MHWVRQAPGQGLEWMGFITPTTGYPEYNQKFKD |
| | | RVTMTADKSTSTAYMELSSLRSEDTAVYYCARRK |
| | | VGKGVYYALDYWGQGTTVTVSSGGGGSGGGGSG |
| | | GGGSGGGGSAIRMTQSPFSLSASVGDRVTITCRASG |
| | | NIHNYLAWYQQKPAKAPKLFIYNTKTLADGVPSRF |
| | | SGSGSGTDYTLTISSLQPEDFATYYCQHFWSSPWTF |
| | | GGGTKVEIK |
| SEQ ID NO: | DNA scFv | CAAGTCCAACTCGTCCAGTCCGGTGCAGAAGTCAAG |
| 2098 | (VH-linker- | AAACCCGGAGCTTCCGTGAAAGTGTCCTGCAAAGCCT |
| | VL) | CCGGTTACACCTTTACGAACTACTGGATGCATTGGGT |
| | | GCGCCAGGCCCCGGGACAGGGGCTGGAATGGATGGG |
| | | CTTCATTACCCCCACCACCGGATACCCCGAGTACAAT |
| | | CAGAAGTTCAAGGACCGGGTCACCATGACCGCCGAC |
| | | AAGTCAACCTCTACTGCTTACATGGAGCTGTCCAGCC |
| | | TGCGGTCGGAAGATACCGCCGTGTATTACTGCGCGAG |
| | | AAGGAAAGTCGGAAAGGGAGTGTACTATGCCCTGGA |
| | | CTACTGGGGACAGGGGACCACTGTGACTGTGTCAAG |
| | | CGGAGGCGGAGGCTCGGGGGGCGGAGGTTCGGGCGG |
| | | AGGAGGATCAGGGGGCGGCGGTTCCGCGATCCGCAT |
| | | GACCCAGAGCCCGTTCTCCCTGTCCGCGTCCGTGGGG |
| | | GACCGCGTGACTATCACGTGTCGGGCCTCCGGGAAC |
| | | ATCCACAACTACCTCGCATGGTACCAGCAGAAGCCG |
| | | GCCAAGGCCCCTAAGTTGTTCATCTACAACACCAAGA |
| | | CTCTTGCCGACGGAGTGCCGTCCCGGTTTAGCGGAAG |
| | | CGGTTCCGGCACCGACTACACCCTGACTATCTCGAGC |
| | | CTGCAACCAGAAGATTTCGCCACTTACTACTGCCAGC |
| | | ACTTCTGGTCGTCCCCTTGGACATTCGGCGGCGGCAC |
| | | CAAGGTCGAGATTAAG |
| SEQ ID NO: | Full CAR | MALPVTALLLPLALLLHAARPQVQLVQSGAEVKK |
| 2099 | amino acid | PGASVKVSCKASGYTFTNYWMHWVRQAPGQGLE |
| | sequence | WMGFITPTTGYPEYNQKFKDRVTMTADKSTSTAY |
| | | MELSSLRSEDTAVYYCARRKVGKGVYYALDYWG |
| | | QGTTVTVSSGGGGSGGGGSGGGGSGGGGSARMT |
| | | QSPFSLSASVGDRVTITCRASGNIHNYLAWYQQKP |
| | | AKAPKLFIYNTKTLADGVPSRFSGSGSGTDYTLTIS |
| | | SLQPEDFATYYCQHFWSSPWTFGGGTKVEIKTTTP |
| | | APRPPTPAPTIASQPLSLRPEACRPAAGGAVHTRGL |
| | | DFACDIYIWAPLAGTCGVLLLSLVITLYCKRGRKK |
| | | LLYIFKQPFMRPVQTTQEEDGCSCRFPEEEEGGCEL |
| | | RVKFSRSADAPAYQQGQNQLYNELNLGRREEYDV |
| | | LDKRRGRDPEMGGKPRRKNPQEGLYNELQKDKM |
| | | AEAYSEIGMKGERRRGKGHDGLYQGLSTATKDTY |
| | | DALHMQALPPR |
| SEQ ID NO: | Full CAR | ATGGCCCTCCCTGTCACCGCCCTGCTGCTTCCGC |
| 2100 | nucleic acid | TGGCTCTTCTGCTCCACGCCGCTCGGCCCCAAGT |
| | sequence | CCAACTCGTCCAGTCCGGTGCAGAAGTCAAGAA |
| | | ACCCGGAGCTTCCGTGAAAGTGTCCTGCAAAGC |
| | | CTCCGGTTACACCTTTACGAACTACTGGATGCAT |
| | | TGGGTGCGCCAGGCCCCGGGACAGGGGCTGGAA |
| | | TGGATGGGCTTCATTACCCCCACCACCGGATACC |
| | | CCGAGTACAATCAGAAGTTCAAGGACCGGGTCA |
| | | CCATGACCGCCGACAAGTCAACCTCTACTGCTTA |
| | | CATGGAGCTGTCCAGCCTGCGGTCGGAAGATAC |
| | | CGCCGTGTATTACTGCGCGAGAAGGAAAGTCGG |
| | | AAAGGGAGTGTACTATGCCCTGGACTACTGGGG |
| | | ACAGGGGACCACTGTGACTGTGTCAAGCGGAGG |
| | | CGGAGGCTCGGGGGGCGGAGGTTCGGGCGGAGG |
| | | AGGATCAGGGGGCGGCGGTTCCGCGATCCGCAT |
| | | GACCCAGAGCCCGTTCTCCCTGTCCGCGTCCGTG |
| | | GGGGACCGCGTGACTATCACGTGTCGGGCCTCC |
| | | GGGAACATCCACAACTACCTCGCATGGTACCAG |
| | | CAGAAGCCGGCCAAGGCCCCTAAGTTGTTCATCT |
| | | ACAACACCAAGACTCTTGCCGACGGAGTGCCGT |
| | | CCCGGTTTAGCGGAAGCGGTTCCGGCACCGACT |
| | | ACACCCTGACTATCTCGAGCCTGCAACCAGAAG |
| | | ATTTCGCCACTTACTACTGCCAGCACTTCTGGTC |
| | | GTCCCCTTGGACATTCGGCGGCGGCACCAAGGTC |
| | | GAGATTAAGACCACTACCCCAGCACCGAGGCCA |
| | | CCCACCCCGGCTCCTACCATCGCCTCCCAGCCTC |
| | | TGTCCCTGCGTCCGGAGGCATGTAGACCCGCAGC |
| | | TGGTGGGGCCGTGCATACCCGGGGTCTTGACTTC |
| | | GCCTGCGATATCTACATTTGGGCCCCTCTGGCTG |
| | | GTACTTGCGGGGTCCTGCTGCTTTCACTCGTGAT |
| | | CACTCTTTACTGTAAGCGCGGTCGGAAGAAGCTG |
| | | CTGTACATCTTTAAGCAACCCTTCATGAGGCCTG |
| | | TGCAGACTACTCAAGAGGAGGACGGCTGTTCAT |
| | | GCCGGTTCCCAGAGGAGGAGGAAGGCGGCTGCG |
| | | AACTGCGCGTGAAATTCAGCCGCAGCGCAGATG |
| | | CTCCAGCCTACCAGCAGGGGCAGAACCAGCTCT |
| | | ACAACGAACTCAATCTTGGTCGGAGAGAGGAGT |
| | | ACGACGTGCTGGACAAGCGGAGAGGACGGGACC |
| | | CAGAAATGGGCGGGAAGCCGCGCAGAAAGAATC |
| | | CCCAAGAGGGCCTGTACAACGAGCTCCAAAAGG |
| | | ATAAGATGGCAGAAGCCTATAGCGAGATTGGTA |
| | | TGAAAGGGGAACGCAGAAGAGGCAAAGGCCAC |
| | | GACGGACTGTACCAGGGACTCAGCACCGCCACC |
| | | AAGGACACCTATGACGCTCTTCACATGCAGGCCC |
| | | TGCCGCCTCGG |
| CD20-C2H4 | | |
| SEQ ID NO: | HCDR1 | NYWMH |
| 2064 (Kabat) | | |
| SEQ ID NO: | HCDR2 | FITPTTGYPEYNQKFKD |
| 2065 (Kabat) | | |
| SEQ ID NO: | HCDR3 | RKVGKGVYYALDY |
| 2066 (Kabat) | | |
| SEQ ID NO: | HCDR1 | GYTFTNY |
| 2022 (Chothia) | | |
| SEQ ID NO: | HCDR2 | TPTTGY |
| 2067 (Chothia) | | |
| SEQ ID NO: | HCDR3 | RKVGKGVYYALDY |
| 2066 (Chothia) | | |
| SEQ ID NO: | HCDR1 | GYTFTNYW |
| 2068 (IMGT) | | |
| SEQ ID NO: | HCDR2 | ITPTTGYP |
| 2069 (IMGT) | | |
| SEQ ID NO: | HCDR3 | ARRKVGKGVYYALDY |
| 2070 (IMGT) | | |
| SEQ ID NO: | HCDR1 | GYTFTNYWMH |
| 2071 (Combined | | |
| Chothia and | | |
| Kabat) | | |
| SEQ ID NO: | HCDR2 | FITPTTGYPEYNQKFKD |
| 2065 (Combined | | |
| Chothia and | | |
| Kabat) | | |
| SEQ ID NO: | HCDR3 | RKVGKGVYYALDY |
| 2066 (Combined | | |
| Chothia and | | |
| Kabat) | | |
| SEQ ID NO: | VH | QVQLVQSGAEVKKPGSSVKVSCKASGYTFTNYW |
| 2087 | | MHWVRQAPGQGLEWMGFITPTTGYPEYNQKFKD |
| | | RVTITADKSTSTAYMELSSLRSEDTAVYYCARRKV |
| | | GKGVYYALDYWGQGTTVTVSS |
| SEQ ID NO: | DNA VH | CAAGTCCAACTCGTCCAAAGCGGTGCAGAAGTC |
| 2101 | | AAGAAGCCCGGTTCCTCCGTGAAAGTGTCCTGCA |
| | | AAGCCTCGGGCTACACCTTCACTAATTACTGGAT |
| | | GCATTGGGTCCGCCAGGCGCCCGGACAGGGATT |
| | | GGAATGGATGGGGTTCATCACGCCGACCACCGG |
| | | ATACCCGGAGTACAACCAGAAGTTCAAGGACAG |
| | | AGTGACCATTACCGCCGATAAGTCCACCTCCACC |
| | | GCTTACATGGAGCTCTCCTCACTGCGGTCCGAAG |
| | | ATACAGCCGTGTACTATTGTGCTCGCCGGAAAGT |
| | | CGGAAAGGGAGTGTACTACGCCCTGGACTATTG |
| | | GGGCCAGGGCACCACCGTGACCGTGTCCTCG |
| SEQ ID NO: | LCDR1 | RASGNIHNYLA |
| 2074 (Kabat) | | |
| SEQ ID NO: | LCDR2 | NTKTLAD |
| 2075 (Kabat) | | |
| SEQ ID NO: | LCDR3 | QHFWSSPWT |
| 2076 (Kabat) | | |
| SEQ ID NO: | LCDR1 | SGNIHNY |
| 2077 (Chothia) | | |
| SEQ ID NO: | LCDR2 | NTK |
| 2078 (Chothia) | | |
| SEQ ID NO: | LCDR3 | FWSSPW |
| 2079 (Chothia) | | |
| SEQ ID NO: | LCDR1 | GNIHNY |
| 2080 (IMGT) | | |
| SEQ ID NO: | LCDR2 | NTK |
| 2078 (IMGT) | | |
| SEQ ID NO: | LCDR3 | QHFWSSPWT |
| 2076 (IMGT) | | |
| SEQ ID NO: | LCDR1 | RASGNIHNYLA |
| 2074 (Combined | | |
| Chothia and | | |
| Kabat) | | |
| SEQ ID NO: | LCDR2 | NTKTLAD |
| 2075 (Combined | | |
| Chothia and | | |
| Kabat) | | |
| SEQ ID NO: | LCDR3 | QHFWSSPWT |
| 2076 (Combined | | |
| Chothia and | | |
| Kabat) | | |
| SEQ ID NO: | VL | AIRMTQSPFSLSASVGDRVTITCRASGNIHNYLAW |
| 2095 | | YQQKPAKAPKLFIYNTKTLADGVPSRFSGSGSGTD |
| | | YTLTISSLQPEDFATYYCQHFWSSPWTFGGGTKVEI |
| | | K |
| SEQ ID NO: | DNA VL | GCCATTAGGATGACTCAGTCCCCTTTCTCCCTCT |
| 2102 | | CCGCGAGCGTGGGCGACCGCGTGACGATCACTT |
| | | GCCGGGCCTCGGGGAACATTCACAACTACCTGG |
| | | CCTGGTACCAGCAGAAGCCGGCCAAGGCCCCTA |
| | | AGCTGTTCATCTACAACACCAAGACCCTTGCGGA |
| | | CGGAGTGCCATCGAGATTTTCCGGCTCGGGCTCT |
| | | GGGACCGATTACACTCTGACTATCTCAAGCCTGC |
| | | AACCTGAGGACTTCGCCACTTACTACTGCCAGCA |
| | | CTTCTGGAGCAGCCCCTGGACTTTCGGTGGCGGG |
| | | ACCAAGGTCGAAATCAAG |
| SEQ ID NO: | Linker | GGGGSGGGGSGGGGSGGGGS |
| 1010 | | |
| SEQ ID NO: | scFv (VH- | QVQLVQSGAEVKKPGSSVKVSCKASGYTFTNYW |
| 2103 | linker-VL) | MHWVRQAPGQGLEWMGFITPTTGYPEYNQKFKD |
| | | RVTITADKSTSTAYMELSSLRSEDTAVYYCARRKV |
| | | GKGVYYALDYWGQGTTVTVSSGGGGSGGGGSGG |
| | | GGSGGGGSAIRMTQSPFSLSASVGDRVTITCRASGN |
| | | IHNYLAWYQQKPAKAPKLFIYNTKTLADGVPSRFS |
| | | GSGSGTDYTLTISSLQPEDFATYYCQHFWSSPWTF |
| | | GGGTKVEIK |
| SEQ ID NO: | DNA scFv | CAAGTCCAACTCGTCCAAAGCGGTGCAGAAGTCAAG |
| 2104 | (VH-linker- | AAGCCCGGTTCCTCCGTGAAAGTGTCCTGCAAAGCCT |
| | VL) | CGGGCTACACCTTCACTAATTACTGGATGCATTGGGT |
| | | CCGCCAGGCGCCCGGACAGGGATTGGAATGGATGGG |
| | | GTTCATCACGCCGACCACCGGATACCCGGAGTACAA |
| | | CCAGAAGTTCAAGGACAGAGTGACCATTACCGCCGA |
| | | TAAGTCCACCTCCACCGCTTACATGGAGCTCTCCTCA |
| | | CTGCGGTCCGAAGATACAGCCGTGTACTATTGTGCTC |
| | | GCCGGAAAGTCGGAAAGGGAGTGTACTACGCCCTGG |
| | | ACTATTGGGGCCAGGGCACCACCGTGACCGTGTCCTC |
| | | GGGAGGAGGGGGTTCGGGCGGAGGCGGCTCCGGTGG |
| | | AGGCGGAAGCGGAGGGGGCGGATCAGCCATTAGGAT |
| | | GACTCAGTCCCCTTTCTCCCTCTCCGCGAGCGTGGGC |
| | | GACCGCGTGACGATCACTTGCCGGGCCTCGGGGAAC |
| | | ATTCACAACTACCTGGCCTGGTACCAGCAGAAGCCG |
| | | GCCAAGGCCCCTAAGCTGTTCATCTACAACACCAAGA |
| | | CCCTTGCGGACGGAGTGCCATCGAGATTTTCCGGCTC |
| | | GGGCTCTGGGACCGATTACACTCTGACTATCTCAAGC |
| | | CTGCAACCTGAGGACTTCGCCACTTACTACTGCCAGC |
| | | ACTTCTGGAGCAGCCCCTGGACTTTCGGTGGCGGGAC |
| | | CAAGGTCGAAATCAAG |
| SEQ ID NO: | Full CAR | MALPVTALLLPLALLLHAARPQVQLVQSGAEVKK |
| 2105 | amino acid | PGSSVKVSCKASGYTFTNYWMHWVRQAPGQGLE |
| | sequence | WMGFITPTTGYPEYNQKFKDRVTITADKSTSTAYM |
| | | ELSSLRSEDTAVYYCARRKVGKGVYYALDYWGQ |
| | | GTTVTVSSGGGGSGGGGSGGGGSGGGGSAIRMTQ |
| | | SPFSLSASVGDRVTITCRASGNIHNYLAWYQQKPA |
| | | KAPKLFIYNTKTLADGVPSRFSGSGSGTDYTLTISSL |
| | | QPEDFATYYCQHFWSSPWTFGGGTKVEIKTTTPAP |
| | | RPPTPAPTIASQPLSLRPEACRPAAGGAVHTRGLDF |
| | | ACDIYIWAPLAGTCGVLLLSLVITLYCKRGRKKLL |
| | | YIFKQPFMRPVQTTQEEDGCSCRFPEEEEGGCELRV |
| | | KFSRSADAPAYQQGQNQLYNELNLGRREEYDVLD |
| | | KRRGRDPEMGGKPRRKNPQEGLYNELQKDKMAE |
| | | AYSEIGMKGERRRGKGHDGLYQGLSTATKDTYDA |
| | | LHMQALPPR |
| SEQ ID NO: | Full CAR | ATGGCCCTCCCTGTCACCGCCCTGCTGCTTCCGC |
| 2106 | nucleic acid | TGGCTCTTCTGCTCCACGCCGCTCGGCCCCAAGT |
| | sequence | CCAACTCGTCCAAAGCGGTGCAGAAGTCAAGAA |
| | | GCCCGGTTCCTCCGTGAAAGTGTCCTGCAAAGCC |
| | | TCGGGCTACACCTTCACTAATTACTGGATGCATT |
| | | GGGTCCGCCAGGCGCCCGGACAGGGATTGGAAT |
| | | GGATGGGGTTCATCACGCCGACCACCGGATACC |
| | | CGGAGTACAACCAGAAGTTCAAGGACAGAGTGA |
| | | CCATTACCGCCGATAAGTCCACCTCCACCGCTTA |
| | | CATGGAGCTCTCCTCACTGCGGTCCGAAGATACA |
| | | GCCGTGTACTATTGTGCTCGCCGGAAAGTCGGAA |
| | | AGGGAGTGTACTACGCCCTGGACTATTGGGGCC |
| | | AGGGCACCACCGTGACCGTGTCCTCGGGAGGAG |
| | | GGGGTTCGGGCGGAGGCGGCTCCGGTGGAGGCG |
| | | GAAGCGGAGGGGGCGGATCAGCCATTAGGATGA |
| | | CTCAGTCCCCTTTCTCCCTCTCCGCGAGCGTGGG |
| | | CGACCGCGTGACGATCACTTGCCGGGCCTCGGG |
| | | GAACATTCACAACTACCTGGCCTGGTACCAGCA |
| | | GAAGCCGGCCAAGGCCCCTAAGCTGTTCATCTAC |
| | | AACACCAAGACCCTTGCGGACGGAGTGCCATCG |
| | | AGATTTTCCGGCTCGGGCTCTGGGACCGATTACA |
| | | CTCTGACTATCTCAAGCCTGCAACCTGAGGACTT |
| | | CGCCACTTACTACTGCCAGCACTTCTGGAGCAGC |
| | | CCCTGGACTTTCGGTGGCGGGACCAAGGTCGAA |
| | | ATCAAGACCACTACCCCAGCACCGAGGCCACCC |
| | | ACCCCGGCTCCTACCATCGCCTCCCAGCCTCTGT |
| | | CCCTGCGTCCGGAGGCATGTAGACCCGCAGCTG |
| | | GTGGGGCCGTGCATACCCGGGGTCTTGACTTCGC |
| | | CTGCGATATCTACATTTGGGCCCCTCTGGCTGGT |
| | | ACTTGCGGGGTCCTGCTGCTTTCACTCGTGATCA |
| | | CTCTTTACTGTAAGCGCGGTCGGAAGAAGCTGCT |
| | | GTACATCTTTAAGCAACCCTTCATGAGGCCTGTG |
| | | CAGACTACTCAAGAGGAGGACGGCTGTTCATGC |
| | | CGGTTCCCAGAGGAGGAGGAAGGCGGCTGCGAA |
| | | CTGCGCGTGAAATTCAGCCGCAGCGCAGATGCT |
| | | CCAGCCTACCAGCAGGGGCAGAACCAGCTCTAC |
| | | AACGAACTCAATCTTGGTCGGAGAGAGGAGTAC |
| | | GACGTGCTGGACAAGCGGAGAGGACGGGACCCA |
| | | GAAATGGGCGGGAAGCCGCGCAGAAAGAATCCC |
| | | CAAGAGGGCCTGTACAACGAGCTCCAAAAGGAT |
| | | AAGATGGCAGAAGCCTATAGCGAGATTGGTATG |
| | | AAAGGGGAACGCAGAAGAGGCAAAGGCCACGA |
| | | CGGACTGTACCAGGGACTCAGCACCGCCACCAA |
| | | GGACACCTATGACGCTCTTCACATGCAGGCCCTG |
| | | CCGCCTCGG |
| CD20-C3H1 | | |
| SEQ ID NO: | HCDR1 | NYNLH |
| 2019 (Kabat) | | |
| SEQ ID NO: | HCDR2 | AIYPGNYDTSYNQKFKG |
| 2020 (Kabat) | | |
| SEQ ID NO: | HCDR3 | VDFGHSRYWYFDV |
| 2021 (Kabat) | | |
| SEQ ID NO: | HCDR1 | GYTFTNY |
| 2022 (Chothia) | | |
| SEQ ID NO: | HCDR2 | YPGNYD |
| 2023 (Chothia) | | |
| SEQ ID NO: | HCDR3 | VDFGHSRYWYFDV |
| 2021 (Chothia) | | |
| SEQ ID NO: | HCDR1 | GYTFTNYN |
| 2024 (IMGT) | | |
| SEQ ID NO: | HCDR2 | IYPGNYDT |
| 2025 (IMGT) | | |
| SEQ ID NO: | HCDR3 | ARVDFGHSRYWYFDV |
| 2026 (IMGT) | | |
| SEQ ID NO: | HCDR1 | GYTFTNYNLH |
| 2027 (Combined | | |
| Chothia and | | |
| Kabat) | | |
| SEQ ID NO: | HCDR2 | AIYPGNYDTSYNQKFKG |
| 2020 (Combined | | |
| Chothia and | | |
| Kabat) | | |
| SEQ ID NO: | HCDR3 | VDFGHSRYWYFDV |
| 2021 (Combined | | |
| Chothia and | | |
| Kabat) | | |
| SEQ ID NO: | VH | QVQLVQSGAEVKKPGASVKVSCKASGYTFTNYNL |
| 2028 | | HWVRQAPGQGLEWMGAIYPGNYDTSYNQKFKGR |
| | | VTMTADKSTSTAYMELSSLRSEDTAVYYCARVDF |
| | | GHSRYWYFDVWGQGTTVTVSS |
| SEQ ID NO: | DNA VH | CAAGTCCAACTCGTCCAATCCGGTGCAGAAGTC |
| 2107 | | AAGAAACCCGGTGCATCCGTGAAAGTGTCATGC |
| | | AAAGCCTCCGGGTACACCTTCACTAACTACAACC |
| | | TCCACTGGGTCCGCCAGGCCCCGGGACAGGGAC |
| | | TGGAGTGGATGGGGGCCATCTACCCGGGAAACT |
| | | ACGACACTTCATACAACCAGAAGTTCAAGGGCA |
| | | GAGTGACCATGACTGCCGACAAGAGCACATCGA |
| | | CCGCCTACATGGAACTCAGCTCCCTGCGCTCCGA |
| | | GGATACTGCCGTCTACTACTGTGCCCGGGTGGAC |
| | | TTCGGCCACTCCCGGTATTGGTATTTCGATGTCT |
| | | GGGGACAGGGAACCACCGTGACTGTGTCCAGC |
| SEQ ID NO: | LCDR1 | RATSSVSSMN |
| 2030 (Kabat) | | |
| SEQ ID NO: | LCDR2 | ATSNLAS |
| 2031 (Kabat) | | |
| SEQ ID NO: | LCDR3 | QQWTFNPPT |
| 2032 (Kabat) | | |
| SEQ ID NO: | LCDR1 | TSSVSS |
| 2033 (Chothia) | | |
| SEQ ID NO: | LCDR2 | ATS |
| 2034 (Chothia) | | |
| SEQ ID NO: | LCDR3 | WTFNPP |
| 2035 (Chothia) | | |
| SEQ ID NO: | LCDR1 | SSVSS |
| 2036 (IMGT) | | |
| SEQ ID NO: | LCDR2 | ATS |
| 2034 (IMGT) | | |
| SEQ ID NO: | LCDR3 | QQWTFNPPT |
| 2032 (IMGT) | | |
| SEQ ID NO: | LCDR1 | RATSSVSSMN |
| 2030 (Combined | | |
| Chothia and | | |
| Kabat) | | |
| SEQ ID NO: | LCDR2 | ATSNLAS |
| 2031 (Combined | | |
| Chothia and | | |
| Kabat) | | |
| SEQ ID NO: | LCDR3 | QQWTFNPPT |
| 2032 (Combined | | |
| Chothia and | | |
| Kabat) | | |
| SEQ ID NO: | VL | EIVLTQSPATLSLSPGERATLSCRATSSVSSMNWYQ |
| 2108 | | QKPGQAPRPLIHATSNLASGIPARFSGSGSGTDYTL |
| | | TISSLEPEDAAVYYCQQWTFNPPTFGQGTKLEIK |
| SEQ ID NO: | DNA VL | GAAATCGTGCTGACCCAGTCCCCTGCGACTCTGA |
| 2109 | | GCCTGAGCCCTGGGGAACGCGCCACTTTGTCATG |
| | | CCGGGCCACCTCCTCCGTGTCCTCCATGAACTGG |
| | | TACCAGCAGAAGCCCGGACAGGCTCCGCGGCCG |
| | | CTGATCCATGCCACCTCCAACCTGGCCAGCGGCA |
| | | TTCCCGCGAGGTTTTCCGGCTCGGGCTCTGGTAC |
| | | CGACTACACCCTGACCATCTCGAGCCTTGAGCCA |
| | | GAAGATGCTGCGGTGTACTACTGCCAACAGTGG |
| | | ACCTTCAATCCGCCTACGTTCGGACAGGGGACCA |
| | | AGCTGGAGATTAAG |
| SEQ ID NO: | Linker | GGGGSGGGGSGGGGSGGGGS |
| 1010 | | |
| SEQ ID NO: | scFv (VH- | QVQLVQSGAEVKKPGASVKVSCKASGYTFTNYNL |
| 2110 | linker-VL) | HWVRQAPGQGLEWMGAIYPGNYDTSYNQKFKGR |
| | | VTMTADKSTSTAYMELSSLRSEDTAVYYCARVDF |
| | | GHSRYWYFDVWGQGTTVTVSSGGGGSGGGGSGG |
| | | GGSGGGGSEIVLTQSPATLSLSPGERATLSCRATSS |
| | | VSSMNWYQQKPGQAPRPLIHATSNLASGIPARFSG |
| | | SGSGTDYTLTISSLEPEDAAVYYCQQWTFNPPTFG |
| | | QGTKLEIK |
| SEQ ID NO: | DNA scFv | CAAGTCCAACTCGTCCAATCCGGTGCAGAAGTCAAG |
| 2111 | (VH-linker- | AAACCCGGTGCATCCGTGAAAGTGTCATGCAAAGCC |
| | VL) | TCCGGGTACACCTTCACTAACTACAACCTCCACTGGG |
| | | TCCGCCAGGCCCCGGGACAGGGACTGGAGTGGATGG |
| | | GGGCCATCTACCCGGGAAACTACGACACTTCATACA |
| | | ACCAGAAGTTCAAGGGCAGAGTGACCATGACTGCCG |
| | | ACAAGAGCACATCGACCGCCTACATGGAACTCAGCT |
| | | CCCTGCGCTCCGAGGATACTGCCGTCTACTACTGTGC |
| | | CCGGGTGGACTTCGGCCACTCCCGGTATTGGTATTTC |
| | | GATGTCTGGGGACAGGGAACCACCGTGACTGTGTCC |
| | | AGCGGGGGCGGAGGATCGGGTGGCGGAGGTTCGGGG |
| | | GGAGGAGGATCAGGCGGCGGCGGATCGGAAATCGTG |
| | | CTGACCCAGTCCCCTGCGACTCTGAGCCTGAGCCCTG |
| | | GGGAACGCGCCACTTTGTCATGCCGGGCCACCTCCTC |
| | | CGTGTCCTCCATGAACTGGTACCAGCAGAAGCCCGG |
| | | ACAGGCTCCGCGGCCGCTGATCCATGCCACCTCCAAC |
| | | CTGGCCAGCGGCATTCCCGCGAGGTTTTCCGGCTCGG |
| | | GCTCTGGTACCGACTACACCCTGACCATCTCGAGCCT |
| | | TGAGCCAGAAGATGCTGCGGTGTACTACTGCCAACA |
| | | GTGGACCTTCAATCCGCCTACGTTCGGACAGGGGACC |
| | | AAGCTGGAGATTAAG |
| SEQ ID NO: | Full CAR | MALPVTALLLPLALLLHAARPQVQLVQSGAEVKK |
| 2112 | amino acid | PGASVKVSCKASGYTFTNYNLHWVRQAPGQGLE |
| | sequence | WMGAIYPGNYDTSYNQKFKGRVTMTADKSTSTA |
| | | YMELSSLRSEDTAVYYCARVDFGHSRYWYFDVW |
| | | GQGTTVTVSSGGGGSGGGGSGGGGSGGGGSEIVLT |
| | | QSPATLSLSPGERATLSCRATSSVSSMNWYQQKPG |
| | | QAPRPLIHATSNLASGIPARFSGSGSGTDYTLTISSL |
| | | EPEDAAVYYCQQWTFNPPTFGQGTKLEIKTTTPAP |
| | | RPPTPAPTIASQPLSLRPEACRPAAGGAVHTRGLDF |
| | | ACDIYIWAPLAGTCGVLLLSLVITLYCKRGRKKLL |
| | | YIFKQPFMRPVQTTQEEDGCSCRFPEEEEGGCELRV |
| | | KFSRSADAPAYQQGQNQLYNELNLGRREEYDVLD |
| | | KRRGRDPEMGGKPRRKNPQEGLYNELQKDKMAE |
| | | AYSEIGMKGERRRGKGHDGLYQGLSTATKDTYDA |
| | | LHMQALPPR |
| Full CAR | SEQ ID NO: | ATGGCCCTCCCTGTCACCGCCCTGCTGCTTCCGC |
| 2113 | nucleic acid | TGGCTCTTCTGCTCCACGCCGCTCGGCCCCAAGT |
| | sequence | CCAACTCGTCCAATCCGGTGCAGAAGTCAAGAA |
| | | ACCCGGTGCATCCGTGAAAGTGTCATGCAAAGC |
| | | CTCCGGGTACACCTTCACTAACTACAACCTCCAC |
| | | TGGGTCCGCCAGGCCCCGGGACAGGGACTGGAG |
| | | TGGATGGGGGCCATCTACCCGGGAAACTACGAC |
| | | ACTTCATACAACCAGAAGTTCAAGGGCAGAGTG |
| | | ACCATGACTGCCGACAAGAGCACATCGACCGCC |
| | | TACATGGAACTCAGCTCCCTGCGCTCCGAGGATA |
| | | CTGCCGTCTACTACTGTGCCCGGGTGGACTTCGG |
| | | CCACTCCCGGTATTGGTATTTCGATGTCTGGGGA |
| | | CAGGGAACCACCGTGACTGTGTCCAGCGGGGGC |
| | | GGAGGATCGGGTGGCGGAGGTTCGGGGGGAGGA |
| | | GGATCAGGCGGCGGCGGATCGGAAATCGTGCTG |
| | | ACCCAGTCCCCTGCGACTCTGAGCCTGAGCCCTG |
| | | GGGAACGCGCCACTTTGTCATGCCGGGCCACCTC |
| | | CTCCGTGTCCTCCATGAACTGGTACCAGCAGAAG |
| | | CCCGGACAGGCTCCGCGGCCGCTGATCCATGCC |
| | | ACCTCCAACCTGGCCAGCGGCATTCCCGCGAGGT |
| | | TTTCCGGCTCGGGCTCTGGTACCGACTACACCCT |
| | | GACCATCTCGAGCCTTGAGCCAGAAGATGCTGC |
| | | GGTGTACTACTGCCAACAGTGGACCTTCAATCCG |
| | | CCTACGTTCGGACAGGGGACCAAGCTGGAGATT |
| | | AAGACCACTACCCCAGCACCGAGGCCACCCACC |
| | | CCGGCTCCTACCATCGCCTCCCAGCCTCTGTCCC |
| | | TGCGTCCGGAGGCATGTAGACCCGCAGCTGGTG |
| | | GGGCCGTGCATACCCGGGGTCTTGACTTCGCCTG |
| | | CGATATCTACATTTGGGCCCCTCTGGCTGGTACT |
| | | TGCGGGGTCCTGCTGCTTTCACTCGTGATCACTC |
| | | TTTACTGTAAGCGCGGTCGGAAGAAGCTGCTGTA |
| | | CATCTTTAAGCAACCCTTCATGAGGCCTGTGCAG |
| | | ACTACTCAAGAGGAGGACGGCTGTTCATGCCGG |
| | | TTCCCAGAGGAGGAGGAAGGCGGCTGCGAACTG |
| | | CGCGTGAAATTCAGCCGCAGCGCAGATGCTCCA |
| | | GCCTACCAGCAGGGGCAGAACCAGCTCTACAAC |
| | | GAACTCAATCTTGGTCGGAGAGAGGAGTACGAC |
| | | GTGCTGGACAAGCGGAGAGGACGGGACCCAGAA |
| | | ATGGGCGGGAAGCCGCGCAGAAAGAATCCCCAA |
| | | GAGGGCCTGTACAACGAGCTCCAAAAGGATAAG |
| | | ATGGCAGAAGCCTATAGCGAGATTGGTATGAAA |
| | | GGGGAACGCAGAAGAGGCAAAGGCCACGACGG |
| | | ACTGTACCAGGGACTCAGCACCGCCACCAAGGA |
| | | CACCTATGACGCTCTTCACATGCAGGCCCTGCCG |
| | | CCTCGG |
| CD20-C3H3 | | |
| SEQ ID NO: | HCDR1 | NYNLH |
| 2019 (Kabat) | | |
| SEQ ID NO: | HCDR2 | AIYPGNYDTSYNQKFKG |
| 2020 (Kabat) | | |
| SEQ ID NO: | HCDR3 | VDFGHSRYWYFDV |
| 2021 (Kabat) | | |
| SEQ ID NO: | HCDR1 | GYTFTNY |
| 2022 (Chothia) | | |
| SEQ ID NO: | HCDR2 | YPGNYD |
| 2023 (Chothia) | | |
| SEQ ID NO: | HCDR3 | VDFGHSRYWYFDV |
| 2021 (Chothia) | | |
| SEQ ID NO: | HCDR1 | GYTFTNYN |
| 2024 (IMGT) | | |
| SEQ ID NO: | HCDR2 | IYPGNYDT |
| 2025 (IMGT) | | |
| SEQ ID NO: | HCDR3 | ARVDFGHSRYWYFDV |
| 2026 (IMGT) | | |
| SEQ ID NO: | VH | QVQLVQSGAEVKKPGASVKVSCKASGYTFTNYW |
| 2072 | | MHWVRQAPGQGLEWMGFITPTTGYPEYNQKFKD |
| | | RVTMTADKSTSTAYMELSSLRSEDTAVYYCARRK |
| | | VGKGVYYALDYWGQGTTVTVSS |
| SEQ ID NO: | DNA VH | CAAGTCCAACTCGTCCAGTCGGGAGCAGAAGTC |
| 2114 | | AAGAAGCCCGGATCATCCGTGAAAGTGTCCTGC |
| | | AAAGCCTCAGGCTACACCTTTACCAACTACAACT |
| | | TGCACTGGGTCAGACAGGCCCCGGGACAGGGCC |
| | | TGGAGTGGATGGGCGCCATCTACCCCGGAAACT |
| | | ATGACACCTCGTACAACCAGAAGTTCAAGGGTC |
| | | GCGTGACTATCACGGCTGACAAGTCCACTAGCA |
| | | CCGCGTACATGGAACTTTCCTCACTGCGGTCCGA |
| | | GGATACTGCGGTGTACTACTGCGCCCGGGTGGA |
| | | CTTCGGACACTCGAGATATTGGTACTTCGATGTC |
| | | TGGGGACAGGGGACCACCGTGACTGTGTCCTCC |
| SEQ ID NO: | LCDR1 | RATSSVSSMN |
| 2030 (Kabat) | | |
| SEQ ID NO: | LCDR2 | ATSNLAS |
| 2031 (Kabat) | | |
| SEQ ID NO: | LCDR3 | QQWTFNPPT |
| 2032 (Kabat) | | |
| SEQ ID NO: | LCDR1 | TSSVSS |
| 2033 (Chothia) | | |
| SEQ ID NO: | LCDR2 | ATS |
| 2034 (Chothia) | | |
| SEQ ID NO: | LCDR3 | WTFNPP |
| 2035 (Chothia) | | |
| SEQ ID NO: | LCDR1 | SSVSS |
| 2036 (IMGT) | | |
| SEQ ID NO: | LCDR2 | ATS |
| 2034 (IMGT) | | |
| SEQ ID NO: | LCDR3 | QQWTFNPPT |
| 2032 (IMGT) | | |
| SEQ ID NO: | LCDR1 | RATSSVSSMN |
| 2030 (Combined | | |
| Chothia and | | |
| Kabat) | | |
| SEQ ID NO: | LCDR2 | ATSNLAS |
| 2031 (Combined | | |
| Chothia and | | |
| Kabat) | | |
| SEQ ID NO: | LCDR3 | QQWTFNPPT |
| 2032 (Combined | | |
| Chothia and | | |
| Kabat) | | |
| SEQ ID NO: | VL | AIRMTQSPFSLSASVGDRVTITCRASGNIHNYLAW |
| 2095 | | YQQKPAKAPKLFIYNTKTLADGVPSRFSGSGSGTD |
| | | YTLTISSLQPEDFATYYCQHFWSSPWTFGGGTKVEI |
| | | K |
| SEQ ID NO: | DNA VL | GAAATTGTGCTGACCCAGTCTCCCGCAACCCTGT |
| 2115 | | CCCTGAGCCCTGGAGAGCGCGCCACCCTGTCCTG |
| | | CCGGGCCACATCCTCCGTGTCGTCCATGAACTGG |
| | | TACCAGCAGAAGCCCGGCCAAGCCCCGAGGCCT |
| | | CTGATTCATGCTACCTCAAATCTGGCCAGCGGAA |
| | | TCCCGGCGCGCTTCTCCGGCTCGGGCAGCGGTAC |
| | | TGACTACACTCTCACCATCTCGTCCCTCGAACCG |
| | | GAGGACGCCGCCGTCTACTACTGTCAGCAGTGG |
| | | ACCTTCAACCCACCTACTTTCGGACAAGGGACCA |
| | | AGCTGGAGATCAAG |
| SEQ ID NO: | Linker | GGGSGGGGSGGGGSGGGGS |
| 2116 | | |
| SEQ ID NO: | scFv (VH- | QVQLVQSGAEVKKPGASVKVSCKASGYTFTNYW |
| 2097 | linker-VL) | MHWVRQAPGQGLEWMGFITPTTGYPEYNQKFKD |
| | | RVTMTADKSTSTAYMELSSLRSEDTAVYYCARRK |
| | | VGKGVYYALDYWGQGTTVTVSSGGGGSGGGGSG |
| | | GGGSGGGGSAIRMTQSPFSLSASVGDRVTITCRASG |
| | | NIHNYLAWYQQKPAKAPKLFIYNTKTLADGVPSRF |
| | | SGSGSGTDYTLTISSLQPEDFATYYCQHFWSSPWTF |
| | | GGGTKVEIK |
| SEQ ID NO: | DNA scFv | CAAGTCCAACTCGTCCAGTCGGGAGCAGAAGTCAAG |
| 2117 | (VH-linker- | AAGCCCGGATCATCCGTGAAAGTGTCCTGCAAAGCCT |
| | VL) | CAGGCTACACCTTTACCAACTACAACTTGCACTGGGT |
| | | CAGACAGGCCCCGGGACAGGGCCTGGAGTGGATGGG |
| | | CGCCATCTACCCCGGAAACTATGACACCTCGTACAAC |
| | | CAGAAGTTCAAGGGTCGCGTGACTATCACGGCTGAC |
| | | AAGTCCACTAGCACCGCGTACATGGAACTTTCCTCAC |
| | | TGCGGTCCGAGGATACTGCGGTGTACTACTGCGCCCG |
| | | GGTGGACTTCGGACACTCGAGATATTGGTACTTCGAT |
| | | GTCTGGGGACAGGGGACCACCGTGACTGTGTCCTCCG |
| | | GGGGCGGTGGCAGCGGGGGAGGCGGAAGCGGCGGA |
| | | GGGGGTTCCGGGGGTGGAGGAAGCGAAATTGTGCTG |
| | | ACCCAGTCTCCCGCAACCCTGTCCCTGAGCCCTGGAG |
| | | AGCGCGCCACCCTGTCCTGCCGGGCCACATCCTCCGT |
| | | GTCGTCCATGAACTGGTACCAGCAGAAGCCCGGCCA |
| | | AGCCCCGAGGCCTCTGATTCATGCTACCTCAAATCTG |
| | | GCCAGCGGAATCCCGGCGCGCTTCTCCGGCTCGGGCA |
| | | GCGGTACTGACTACACTCTCACCATCTCGTCCCTCGA |
| | | ACCGGAGGACGCCGCCGTCTACTACTGTCAGCAGTG |
| | | GACCTTCAACCCACCTACTTTCGGACAAGGGACCAAG |
| | | CTGGAGATCAAG |
| SEQ ID NO: | Full CAR | MALPVTALLLPLALLLHAARPQVQLVQSGAEVKK |
| 2118 | amino acid | PGSSVKVSCKASGYTFTNYNLHWVRQAPGQGLEW |
| | sequence | MGAIYPGNYDTSYNQKFKGRVTITADKSTSTAYM |
| | | ELSSLRSEDTAVYYCARVDFGHSRYWYFDVWGQG |
| | | TTVTVSSGGGGSGGGGSGGGSGGGGSEIVLTQSP |
| | | ATLSLSPGERATLSCRATSSVSSMNWYQQKPGQAP |
| | | RPLIHATSNLASGIPARFSGSGSGTDYTLTISSLEPED |
| | | AAVYYCQQWTFNPPTFGQGTKLEIKTTTPAPRPPTP |
| | | APTIASQPLSLRPEACRPAAGGAVHTRGLDFACDIY |
| | | IWAPLAGTCGVLLLSLVITLYCKRGRKKLLYIFKQP |
| | | FMRPVQTTQEEDGCSCRFPEEEEGGCELRVKFSRS |
| | | ADAPAYQQGQNQLYNELNLGRREEYDVLDKRRG |
| | | RDPEMGGKPRRKNPQEGLYNELQKDKMAEAYSEI |
| | | GMKGERRRGKGHDGLYQGLSTATKDTYDALHMQ |
| | | ALPPR |
| SEQ ID NO: | Full CAR | ATGGCCCTCCCTGTCACCGCCCTGCTGCTTCCGC |
| 2119 | nucleic acid | TGGCTCTTCTGCTCCACGCCGCTCGGCCCCAAGT |
| | sequence | CCAACTCGTCCAGTCGGGAGCAGAAGTCAAGAA |
| | | GCCCGGATCATCCGTGAAAGTGTCCTGCAAAGC |
| | | CTCAGGCTACACCTTTACCAACTACAACTTGCAC |
| | | TGGGTCAGACAGGCCCCGGGACAGGGCCTGGAG |
| | | TGGATGGGCGCCATCTACCCCGGAAACTATGAC |
| | | ACCTCGTACAACCAGAAGTTCAAGGGTCGCGTG |
| | | ACTATCACGGCTGACAAGTCCACTAGCACCGCGT |
| | | ACATGGAACTTTCCTCACTGCGGTCCGAGGATAC |
| | | TGCGGTGTACTACTGCGCCCGGGTGGACTTCGGA |
| | | CACTCGAGATATTGGTACTTCGATGTCTGGGGAC |
| | | AGGGGACCACCGTGACTGTGTCCTCCGGGGGCG |
| | | GTGGCAGCGGGGGAGGCGGAAGCGGCGGAGGG |
| | | GGTTCCGGGGGTGGAGGAAGCGAAATTGTGCTG |
| | | ACCCAGTCTCCCGCAACCCTGTCCCTGAGCCCTG |
| | | GAGAGCGCGCCACCCTGTCCTGCCGGGCCACAT |
| | | CCTCCGTGTCGTCCATGAACTGGTACCAGCAGAA |
| | | GCCCGGCCAAGCCCCGAGGCCTCTGATTCATGCT |
| | | ACCTCAAATCTGGCCAGCGGAATCCCGGCGCGC |
| | | TTCTCCGGCTCGGGCAGCGGTACTGACTACACTC |
| | | TCACCATCTCGTCCCTCGAACCGGAGGACGCCGC |
| | | CGTCTACTACTGTCAGCAGTGGACCTTCAACCCA |
| | | CCTACTTTCGGACAAGGGACCAAGCTGGAGATC |
| | | AAGACCACTACCCCAGCACCGAGGCCACCCACC |
| | | CCGGCTCCTACCATCGCCTCCCAGCCTCTGTCCC |
| | | TGCGTCCGGAGGCATGTAGACCCGCAGCTGGTG |
| | | GGGCCGTGCATACCCGGGGTCTTGACTTCGCCTG |
| | | CGATATCTACATTTGGGCCCCTCTGGCTGGTACT |
| | | TGCGGGGTCCTGCTGCTTTCACTCGTGATCACTC |
| | | TTTACTGTAAGCGCGGTCGGAAGAAGCTGCTGTA |
| | | CATCTTTAAGCAACCCTTCATGAGGCCTGTGCAG |
| | | ACTACTCAAGAGGAGGACGGCTGTTCATGCCGG |
| | | TTCCCAGAGGAGGAGGAAGGCGGCTGCGAACTG |
| | | CGCGTGAAATTCAGCCGCAGCGCAGATGCTCCA |
| | | GCCTACCAGCAGGGGCAGAACCAGCTCTACAAC |
| | | GAACTCAATCTTGGTCGGAGAGAGGAGTACGAC |
| | | GTGCTGGACAAGCGGAGAGGACGGGACCCAGAA |
| | | ATGGGCGGGAAGCCGCGCAGAAAGAATCCCCAA |
| | | GAGGGCCTGTACAACGAGCTCCAAAAGGATAAG |
| | | ATGGCAGAAGCCTATAGCGAGATTGGTATGAAA |
| | | GGGGAACGCAGAAGAGGCAAAGGCCACGACGG |
| | | ACTGTACCAGGGACTCAGCACCGCCACCAAGGA |
| | | CACCTATGACGCTCTTCACATGCAGGCCCTGCCG |
| | | CCTCGG |
| CD20-C3H4 | | |
| SEQ ID NO: | HCDR1 | NYNLH |
| 2019 (Kabat) | | |
| SEQ ID NO: | HCDR2 | AIYPGNYDTSYNQKFKG |
| 2020 (Kabat) | | |
| SEQ ID NO: | HCDR3 | VDFGHSRYWYFDV |
| 2021 (Kabat) | | |
| SEQ ID NO: | HCDR1 | GYTFTNY |
| 2022 (Chothia) | | |
| SEQ ID NO: | HCDR2 | YPGNYD |
| 2023 (Chothia) | | |
| SEQ ID NO: | HCDR3 | VDFGHSRYWYFDV |
| 2021 (Chothia) | | |
| SEQ ID NO: | HCDR1 | GYTFTNYN |
| 2024 (IMGT) | | |
| SEQ ID NO: | HCDR2 | IYPGNYDT |
| 2025 (IMGT) | | |
| SEQ ID NO: | HCDR3 | ARVDFGHSRYWYFDV |
| 2026 (IMGT) | | |
| SEQ ID NO: | HCDR1 | GYTFTNYNLH |
| 2027 (Combined | | |
| Chothia and | | |
| Kabat) | | |
| SEQ ID NO: | HCDR2 | AIYPGNYDTSYNQKFKG |
| 2020 (Combined | | |
| Chothia and | | |
| Kabat) | | |
| SEQ ID NO: | HCDR3 | VDFGHSRYWYFDV |
| 2021 (Combined | | |
| Chothia and | | |
| Kabat) | | |
| SEQ ID NO: | VH | QVQLVQSGAEVKKPGSSVKVSCKASGYTFTNYNL |
| 2120 | | HWVRQAPGQGLEWMGAIYPGNYDTSYNQKFKGR |
| | | VTITADKSTSTAYMELSSLRSEDTAVYYCARVDFG |
| | | HSRYWYFDVWGQGTTVTVSS |
| SEQ ID NO: | DNA VH | CAAGTCCAACTCGTCCAGTCGGGAGCAGAAGTC |
| 2114 | | AAGAAGCCCGGATCATCCGTGAAAGTGTCCTGC |
| | | AAAGCCTCAGGCTACACCTTTACCAACTACAACT |
| | | TGCACTGGGTCAGACAGGCCCCGGGACAGGGCC |
| | | TGGAGTGGATGGGCGCCATCTACCCCGGAAACT |
| | | ATGACACCTCGTACAACCAGAAGTTCAAGGGTC |
| | | GCGTGACTATCACGGCTGACAAGTCCACTAGCA |
| | | CCGCGTACATGGAACTTTCCTCACTGCGGTCCGA |
| | | GGATACTGCGGTGTACTACTGCGCCCGGGTGGA |
| | | CTTCGGACACTCGAGATATTGGTACTTCGATGTC |
| | | TGGGGACAGGGGACCACCGTGACTGTGTCCTCC |
| SEQ ID NO: | LCDR1 | RATSSVSSMN |
| 2030 (Kabat) | | |
| SEQ ID NO: | LCDR2 | ATSNLAS |
| 2031 (Kabat) | | |
| SEQ ID NO: | LCDR3 | QQWTFNPPT |
| 2032 (Kabat) | | |
| SEQ ID NO: | LCDR1 | TSSVSS |
| 2033 (Chothia) | | |
| SEQ ID NO: | LCDR2 | ATS |
| 2034 (Chothia) | | |
| SEQ ID NO: | LCDR3 | WTFNPP |
| 2035 (Chothia) | | |
| SEQ ID NO: | LCDR1 | SSVSS |
| 2036 (IMGT) | | |
| SEQ ID NO: | LCDR2 | ATS |
| 2034 (IMGT) | | |
| SEQ ID NO: | LCDR3 | QQWTFNPPT |
| 2032 (IMGT) | | |
| SEQ ID NO: | LCDR1 | RATSSVSSMN |
| 2030 (Combined | | |
| Chothia and | | |
| Kabat) | | |
| SEQ ID NO: | LCDR2 | ATSNLAS |
| 2031 (Combined | | |
| Chothia and | | |
| Kabat) | | |
| SEQ ID NO: | LCDR3 | QQWTFNPPT |
| 2032 (Combined | | |
| Chothia and | | |
| Kabat) | | |
| SEQ ID NO: | VL | EIVLTQSPATLSLSPGERATLSCRATSSVSSMNWYQ |
| 2108 | | QKPGQAPRPLIHATSNLASGIPARFSGSGSGTDYTL |
| | | TISSLEPEDAAVYYCQQWTFNPPTFGQGTKLEIK |
| SEQ ID NO: | DNA VL | GAAATTGTGCTGACCCAGTCTCCCGCAACCCTGT |
| 2115 | | CCCTGAGCCCTGGAGAGCGCGCCACCCTGTCCTG |
| | | CCGGGCCACATCCTCCGTGTCGTCCATGAACTGG |
| | | TACCAGCAGAAGCCCGGCCAAGCCCCGAGGCCT |
| | | CTGATTCATGCTACCTCAAATCTGGCCAGCGGAA |
| | | TCCCGGCGCGCTTCTCCGGCTCGGGCAGCGGTAC |
| | | TGACTACACTCTCACCATCTCGTCCCTCGAACCG |
| | | GAGGACGCCGCCGTCTACTACTGTCAGCAGTGG |
| | | ACCTTCAACCCACCTACTTTCGGACAAGGGACCA |
| | | AGCTGGAGATCAAG |
| SEQ ID NO: | Linker | GGGGSGGGGSGGGGSGGGGS |
| 1010 | | |
| SEQ ID NO: | scFv (VH- | QVQLVQSGAEVKKPGSSVKVSCKASGYTFTNYNL |
| 2121 | linker-VL) | HWVRQAPGQGLEWMGAIYPGNYDTSYNQKFKGR |
| | | VTITADKSTSTAYMELSSLRSEDTAVYYCARVDFG |
| | | HSRYWYFDVWGQGTTVTVSSGGGGSGGGGSGGG |
| | | GSGGGGSEIVLTQSPATLSLSPGERATLSCRATSSVS |
| | | SMNWYQQKPGQAPRPLIHATSNLASGIPARFSGSG |
| | | SGTDYTLTISSLEPEDAAVYYCQQWTFNPPTFGQG |
| | | TKLEIK |
| SEQ ID NO: | DNA scFv | CAAGTCCAACTCGTCCAATCCGGCGCAGAAGTCAAG |
| 2122 | (VH-linker- | AAACCAGGATCGTCCGTGAAAGTGTCCTGCAAGGCG |
| | VL) | TCCGGGTACACCTTCACTAATTACAACCTCCACTGGG |
| | | TCAGACAGGCCCCAGGACAGGGCCTGGAATGGATGG |
| | | GCGCCATCTACCCTGGAAACTACGATACCTCGTACAA |
| | | CCAGAAGTTCAAGGGCCGCGTGACTATTACCGCCGA |
| | | CAAGAGCACCTCCACCGCCTATATGGAACTGTCGTCC |
| | | CTGCGGTCCGAGGACACTGCCGTGTACTACTGTGCAA |
| | | GGGTGGACTTCGGTCACTCCCGGTATTGGTACTTCGA |
| | | CGTCTGGGGACAGGGGACCACTGTGACCGTGTCGTC |
| | | GGGAGGCGGTGGAAGCGGCGGTGGCGGAAGCGGAG |
| | | GCGGCGGATCAGGGGGCGGAGGAAGCGACATTCAGC |
| | | TTACCCAGTCACCGTCCTTCCTGAGCGCCTCCGTGGG |
| | | AGATCGCGTGACCATCACATGCCGCGCCACTTCCTCG |
| | | GTGTCCTCCATGAACTGGTACCAGCAGAAGCCCGGA |
| | | AAGGCTCCTAAGCCTCTGATCCATGCGACCTCCAACT |
| | | TGGCTTCCGGGGTGCCGTCACGGTTCAGCGGCAGCGG |
| | | TTCAGGAACTGAGTACACCCTGACTATTAGCTCTCTC |
| | | CAACCCGAGGACTTCGCCACCTACTACTGCCAGCAGT |
| | | GGACCTTCAACCCGCCCACGTTTGGGCAGGGTACCAA |
| | | GCTGGAGATCAAG |
| SEQ ID NO: | Full CAR | MALPVTALLLPLALLLHAARPQVQLVQSGAEVKK |
| 2123 | amino acid | PGSSVKVSCKASGYTFTNYNLHWVRQAPGQGLEW |
| | sequence | MGAIYPGNYDTSYNQKFKGRVTITADKSTSTAYM |
| | | ELSSLRSEDTAVYYCARVDFGHSRYWYFDVWGQG |
| | | TTVTVSSGGGGSGGGGSGGGGSGGGGSDIQLTQSP |
| | | SFLSASVGDRVTITCRATSSVSSMNWYQQKPGKAP |
| | | KPLIHATSNLASGVPSRFSGSGSGTEYTLTISSLQPE |
| | | DFATYYCQQWTFNPPTFGQGTKLEIKTTTPAPRPPT |
| | | PAPTIASQPLSLRPEACRPAAGGAVHTRGLDFACDI |
| | | YIWAPLAGTCGVLLLSLVITLYCKRGRKKLLYIFKQ |
| | | PFMRPVQTTQEEDGCSCRFPEEEEGGCELRVKFSRS |
| | | ADAPAYQQGQNQLYNELNLGRREEYDVLDKRRG |
| | | RDPEMGGKPRRKNPQEGLYNELQKDKMAEAYSEI |
| | | GMKGERRRGKGHDGLYQGLSTATKDTYDALHMQ |
| | | ALPPR |
| SEQ ID NO: | Full CAR | ATGGCCCTCCCTGTCACCGCCCTGCTGCTTCCGC |
| 2124 | nucleic acid | TGGCTCTTCTGCTCCACGCCGCTCGGCCCCAAGT |
| | sequence | CCAACTCGTCCAATCCGGCGCAGAAGTCAAGAA |
| | | ACCAGGATCGTCCGTGAAAGTGTCCTGCAAGGC |
| | | GTCCGGGTACACCTTCACTAATTACAACCTCCAC |
| | | TGGGTCAGACAGGCCCCAGGACAGGGCCTGGAA |
| | | TGGATGGGCGCCATCTACCCTGGAAACTACGAT |
| | | ACCTCGTACAACCAGAAGTTCAAGGGCCGCGTG |
| | | ACTATTACCGCCGACAAGAGCACCTCCACCGCCT |
| | | ATATGGAACTGTCGTCCCTGCGGTCCGAGGACAC |
| | | TGCCGTGTACTACTGTGCAAGGGTGGACTTCGGT |
| | | CACTCCCGGTATTGGTACTTCGACGTCTGGGGAC |
| | | AGGGGACCACTGTGACCGTGTCGTCGGGAGGCG |
| | | GTGGAAGCGGCGGTGGCGGAAGCGGAGGCGGC |
| | | GGATCAGGGGGCGGAGGAAGCGACATTCAGCTT |
| | | ACCCAGTCACCGTCCTTCCTGAGCGCCTCCGTGG |
| | | GAGATCGCGTGACCATCACATGCCGCGCCACTTC |
| | | CTCGGTGTCCTCCATGAACTGGTACCAGCAGAAG |
| | | CCCGGAAAGGCTCCTAAGCCTCTGATCCATGCGA |
| | | CCTCCAACTTGGCTTCCGGGGTGCCGTCACGGTT |
| | | CAGCGGCAGCGGTTCAGGAACTGAGTACACCCT |
| | | GACTATTAGCTCTCTCCAACCCGAGGACTTCGCC |
| | | ACCTACTACTGCCAGCAGTGGACCTTCAACCCGC |
| | | CCACGTTTGGGCAGGGTACCAAGCTGGAGATCA |
| | | AGACCACTACCCCAGCACCGAGGCCACCCACCC |
| | | CGGCTCCTACCATCGCCTCCCAGCCTCTGTCCCT |
| | | GCGTCCGGAGGCATGTAGACCCGCAGCTGGTGG |
| | | GGCCGTGCATACCCGGGGTCTTGACTTCGCCTGC |
| | | GATATCTACATTTGGGCCCCTCTGGCTGGTACTT |
| | | GCGGGGTCCTGCTGCTTTCACTCGTGATCACTCT |
| | | TTACTGTAAGCGCGGTCGGAAGAAGCTGCTGTA |
| | | CATCTTTAAGCAACCCTTCATGAGGCCTGTGCAG |
| | | ACTACTCAAGAGGAGGACGGCTGTTCATGCCGG |
| | | TTCCCAGAGGAGGAGGAAGGCGGCTGCGAACTG |
| | | CGCGTGAAATTCAGCCGCAGCGCAGATGCTCCA |
| | | GCCTACCAGCAGGGGCAGAACCAGCTCTACAAC |
| | | GAACTCAATCTTGGTCGGAGAGAGGAGTACGAC |
| | | GTGCTGGACAAGCGGAGAGGACGGGACCCAGAA |
| | | ATGGGCGGGAAGCCGCGCAGAAAGAATCCCCAA |
| | | GAGGGCCTGTACAACGAGCTCCAAAAGGATAAG |
| | | ATGGCAGAAGCCTATAGCGAGATTGGTATGAAA |
| | | GGGGAACGCAGAAGAGGCAAAGGCCACGACGG |
| | | ACTGTACCAGGGACTCAGCACCGCCACCAAGGA |
| | | CACCTATGACGCTCTTCACATGCAGGCCCTGCCG |
| | | CCTCGG |
| CD20-C5H2 | | |
| SEQ ID NO: | HCDR1 | SYNMH |
| 2043 (Kabat) | | |
| SEQ ID NO: | HCDR2 | AIYPGNGDTSYNPKFKG |
| 2044 (Kabat) | | |
| SEQ ID NO: | HCDR3 | SYFYGSSSWYFDV |
| 2045 (Kabat) | | |
| SEQ ID NO: | HCDR1 | GYTFTSY |
| 2046 (Chothia) | | |
| SEQ ID NO: | HCDR2 | YPGNGD |
| 2047 (Chothia) | | |
| SEQ ID NO: | HCDR3 | SYFYGSSSWYFDV |
| 2045 (Chothia) | | |
| SEQ ID NO: | HCDR1 | GYTFTSYN |
| 2048 (IMGT) | | |
| SEQ ID NO: | HCDR2 | IYPGNGDT |
| 2049 (IMGT) | | |
| SEQ ID NO: | HCDR3 | ARSYFYGSSSWYFDV |
| 2050 (IMGT) | | |
| SEQ ID NO: | HCDR1 | GYTFTSYNMH |
| 2051 (Combined | | |
| Chothia and | | |
| Kabat) | | |
| SEQ ID NO: | HCDR2 | AIYPGNGDTSYNPKFKG |
| 2044 (Combined | | |
| Chothia and | | |
| Kabat) | | |
| SEQ ID NO: | HCDR3 | SYFYGSSSWYFDV |
| 2045 (Combined | | |
| Chothia and | | |
| Kabat) | | |
| SEQ ID NO: | VH | QVQLVQSGAEVKKPGASVKVSCKASGYTFTSYNM |
| 2052 | | HWVRQAPGQGLEWMGAIYPGNGDTSYNPKFKGR |
| | | VTMTADKSTRTAYMELSSLRSEDTAVYYCARSYF |
| | | YGSSSWYFDVWGQGTTVTVSS |
| SEQ ID NO: | DNA VH | CAAGTCCAACTCGTCCAGTCAGGAGCAGAAGTC |
| 2125 | | AAGAAACCTGGAGCTTCCGTGAAAGTGTCGTGC |
| | | AAGGCCTCCGGCTACACCTTCACCTCTTACAACA |
| | | TGCACTGGGTCAGACAGGCCCCTGGTCAAGGAC |
| | | TGGAATGGATGGGAGCGATCTACCCGGGCAACG |
| | | GAGACACTTCGTACAACCCCAAGTTCAAGGGAC |
| | | GGGTCACTATGACCGCCGATAAGAGCACGCGCA |
| | | CCGCGTACATGGAACTGAGCAGCCTGCGCTCCG |
| | | AGGACACTGCCGTGTATTACTGCGCGAGGAGCT |
| | | ACTTCTACGGATCATCGTCGTGGTACTTCGACGT |
| | | CTGGGGCCAGGGCACCACCGTGACCGTGTCATC |
| | | C |
| SEQ ID NO: | LCDR1 | RASSSVSSMH |
| 2054 (Kabat) | | |
| SEQ ID NO: | LCDR2 | ATSNLAS |
| 2031 (Kabat) | | |
| SEQ ID NO: | LCDR3 | QQWIFNPPT |
| 2055 (Kabat) | | |
| SEQ ID NO: | LCDR1 | SSSVSS |
| 2056 (Chothia) | | |
| SEQ ID NO: | LCDR2 | ATS |
| 2034 (Chothia) | | |
| SEQ ID NO: | LCDR3 | WIFNPP |
| 2057 (Chothia) | | |
| SEQ ID NO: | LCDR1 | SSVSS |
| 2036 (IMGT) | | |
| SEQ ID NO: | LCDR2 | ATS |
| 2034 (IMGT) | | |
| SEQ ID NO: | LCDR3 | QQWIFNPPT |
| 2055 (IMGT) | | |
| SEQ ID NO: | LCDR1 | RASSSVSSMH |
| 2054 (Combined | | |
| Chothia and | | |
| Kabat) | | |
| SEQ ID NO: | LCDR2 | ATSNLAS |
| 2031 (Combined | | |
| Chothia and | | |
| Kabat) | | |
| SEQ ID NO: | LCDR3 | QQWIFNPPT |
| 2055 (Combined | | |
| Chothia and | | |
| Kab at) | | |
| SEQ ID NO: | VL | DIQLTQSPSFLSASVGDRVTITCRASSSVSSMHWYQ |
| 2126 | | QKPGKAPKPLIFATSNLASGVPSRFSGSGSGTEYTL |
| | | TISSLQPEDFATYYCQQWIFNPPTFGGGTKVEIK |
| SEQ ID NO: | DNA VL | GATATTCAGCTGACCCAGAGCCCGTCATTCCTGT |
| 2127 | | CCGCCTCCGTGGGAGACAGAGTGACCATCACTT |
| | | GTCGGGCCAGCTCCTCGGTGTCCTCCATGCATTG |
| | | GTATCAGCAGAAGCCTGGGAAGGCTCCCAAGCC |
| | | CCTCATCTTCGCCACATCAAATCTTGCCTCCGGG |
| | | GTGCCAAGCCGGTTCTCCGGGAGCGGCTCCGGT |
| | | ACTGAGTACACTCTGACCATTTCCTCCTTGCAAC |
| | | CCGAGGACTTTGCCACCTACTACTGCCAGCAGTG |
| | | GATCTTTAACCCGCCGACCTTCGGAGGAGGAAC |
| | | CAAAGTGGAGATCAAG |
| SEQ ID NO: | Linker | GGGGSGGGGSGGGGSGGGGS |
| 1010 | | |
| SEQ ID NO: | scFv (VH- | QVQLVQSGAEVKKPGASVKVSCKASGYTFTSYNM |
| 2128 | linker-VL) | HWVRQAPGQGLEWMGAIYPGNGDTSYNPKFKGR |
| | | VTMTADKSTRTAYMELSSLRSEDTAVYYCARSYF |
| | | YGSSSWYFDVWGQGTTVTVSSGGGGSGGGGSGG |
| | | GGSGGGGSDIQLTQSPSFLSASVGDRVTITCRASSS |
| | | VSSMHWYQQKPGKAPKPLIFATSNLASGVPSRFSG |
| | | SGSGTEYTLTISSLQPEDFATYYCQQWIFNPPTFGG |
| | | GTKVEIK |
| SEQ ID NO: | DNA scFv | CAAGTCCAACTCGTCCAGTCAGGAGCAGAAGTCAAG |
| 2129 | (VH-linker- | AAACCTGGAGCTTCCGTGAAAGTGTCGTGCAAGGCCT |
| | VL) | CCGGCTACACCTTCACCTCTTACAACATGCACTGGGT |
| | | CAGACAGGCCCCTGGTCAAGGACTGGAATGGATGGG |
| | | AGCGATCTACCCGGGCAACGGAGACACTTCGTACAA |
| | | CCCCAAGTTCAAGGGACGGGTCACTATGACCGCCGA |
| | | TAAGAGCACGCGCACCGCGTACATGGAACTGAGCAG |
| | | CCTGCGCTCCGAGGACACTGCCGTGTATTACTGCGCG |
| | | AGGAGCTACTTCTACGGATCATCGTCGTGGTACTTCG |
| | | ACGTCTGGGGCCAGGGCACCACCGTGACCGTGTCATC |
| | | CGGTGGCGGAGGATCGGGGGGCGGAGGAAGCGGCG |
| | | GGGGGGGCTCCGGCGGTGGAGGCTCGGATATTCAGC |
| | | TGACCCAGAGCCCGTCATTCCTGTCCGCCTCCGTGGG |
| | | AGACAGAGTGACCATCACTTGTCGGGCCAGCTCCTCG |
| | | GTGTCCTCCATGCATTGGTATCAGCAGAAGCCTGGGA |
| | | AGGCTCCCAAGCCCCTCATCTTCGCCACATCAAATCT |
| | | TGCCTCCGGGGTGCCAAGCCGGTTCTCCGGGAGCGGC |
| | | TCCGGTACTGAGTACACTCTGACCATTTCCTCCTTGC |
| | | AACCCGAGGACTTTGCCACCTACTACTGCCAGCAGTG |
| | | GATCTTTAACCCGCCGACCTTCGGAGGAGGAACCAA |
| | | AGTGGAGATCAAG |
| SEQ ID NO: | Full CAR | MALPVTALLLPLALLLHAARPQVQLVQSGAEVKK |
| 2130 | amino acid | PGASVKVSCKASGYTFTSYNMHWVRQAPGQGLE |
| | sequence | WMGAIYPGNGDTSYNPKFKGRVTMTADKSTRTAY |
| | | MELSSLRSEDTAVYYCARSYFYGSSSWYFDVWGQ |
| | | GTTVTVSSGGGGSGGGGSGGGGSGGGGSDIQLTQS |
| | | PSFLSASVGDRVTITCRASSSVSSMHWYQQKPGKA |
| | | PKPLIFATSNLASGVPSRFSGSGSGTEYTLTISSLQPE |
| | | DFATYYCQQWIFNPPTFGGGTKVEIKTTTPAPRPPT |
| | | PAPTIASQPLSLRPEACRPAAGGAVHTRGLDFACDI |
| | | YIWAPLAGTCGVLLLSLVITLYCKRGRKKLLYIFKQ |
| | | PFMRPVQTTQEEDGCSCRFPEEEEGGCELRVKFSRS |
| | | ADAPAYQQGQNQLYNELNLGRREEYDVLDKRRG |
| | | RDPEMGGKPRRKNPQEGLYNELQKDKMAEAYSEI |
| | | GMKGERRRGKGHDGLYQGLSTATKDTYDALHMQ |
| | | ALPPR |
| SEQ ID NO: | Full CAR | ATGGCCCTCCCTGTCACCGCCCTGCTGCTTCCGC |
| 2131 | nucleic acid | TGGCTCTTCTGCTCCACGCCGCTCGGCCCCAAGT |
| | sequence | CCAACTCGTCCAGTCAGGAGCAGAAGTCAAGAA |
| | | ACCTGGAGCTTCCGTGAAAGTGTCGTGCAAGGC |
| | | CTCCGGCTACACCTTCACCTCTTACAACATGCAC |
| | | TGGGTCAGACAGGCCCCTGGTCAAGGACTGGAA |
| | | TGGATGGGAGCGATCTACCCGGGCAACGGAGAC |
| | | ACTTCGTACAACCCCAAGTTCAAGGGACGGGTC |
| | | ACTATGACCGCCGATAAGAGCACGCGCACCGCG |
| | | TACATGGAACTGAGCAGCCTGCGCTCCGAGGAC |
| | | ACTGCCGTGTATTACTGCGCGAGGAGCTACTTCT |
| | | ACGGATCATCGTCGTGGTACTTCGACGTCTGGGG |
| | | CCAGGGCACCACCGTGACCGTGTCATCCGGTGG |
| | | CGGAGGATCGGGGGGCGGAGGAAGCGGCGGGG |
| | | GGGGCTCCGGCGGTGGAGGCTCGGATATTCAGC |
| | | TGACCCAGAGCCCGTCATTCCTGTCCGCCTCCGT |
| | | GGGAGACAGAGTGACCATCACTTGTCGGGCCAG |
| | | CTCCTCGGTGTCCTCCATGCATTGGTATCAGCAG |
| | | AAGCCTGGGAAGGCTCCCAAGCCCCTCATCTTCG |
| | | CCACATCAAATCTTGCCTCCGGGGTGCCAAGCCG |
| | | GTTCTCCGGGAGCGGCTCCGGTACTGAGTACACT |
| | | CTGACCATTTCCTCCTTGCAACCCGAGGACTTTG |
| | | CCACCTACTACTGCCAGCAGTGGATCTTTAACCC |
| | | GCCGACCTTCGGAGGAGGAACCAAAGTGGAGAT |
| | | CAAGACCACTACCCCAGCACCGAGGCCACCCAC |
| | | CCCGGCTCCTACCATCGCCTCCCAGCCTCTGTCC |
| | | CTGCGTCCGGAGGCATGTAGACCCGCAGCTGGT |
| | | GGGGCCGTGCATACCCGGGGTCTTGACTTCGCCT |
| | | GCGATATCTACATTTGGGCCCCTCTGGCTGGTAC |
| | | TTGCGGGGTCCTGCTGCTTTCACTCGTGATCACT |
| | | CTTTACTGTAAGCGCGGTCGGAAGAAGCTGCTGT |
| | | ACATCTTTAAGCAACCCTTCATGAGGCCTGTGCA |
| | | GACTACTCAAGAGGAGGACGGCTGTTCATGCCG |
| | | GTTCCCAGAGGAGGAGGAAGGCGGCTGCGAACT |
| | | GCGCGTGAAATTCAGCCGCAGCGCAGATGCTCC |
| | | AGCCTACCAGCAGGGGCAGAACCAGCTCTACAA |
| | | CGAACTCAATCTTGGTCGGAGAGAGGAGTACGA |
| | | CGTGCTGGACAAGCGGAGAGGACGGGACCCAGA |
| | | AATGGGCGGGAAGCCGCGCAGAAAGAATCCCCA |
| | | AGAGGGCCTGTACAACGAGCTCCAAAAGGATAA |
| | | GATGGCAGAAGCCTATAGCGAGATTGGTATGAA |
| | | AGGGGAACGCAGAAGAGGCAAAGGCCACGACG |
| | | GACTGTACCAGGGACTCAGCACCGCCACCAAGG |
| | | ACACCTATGACGCTCTTCACATGCAGGCCCTGCC |
| | | GCCTCGG |
| CD20-C5H3 | | |
| SEQ ID NO: | HCDR1 | SYNMH |
| 2043 (Kabat) | | |
| SEQ ID NO: | HCDR2 | AIYPGNGDTSYNPKFKG |
| 2044 (Kabat) | | |
| SEQ ID NO: | HCDR3 | SYFYGSSSWYFDV |
| 2045 (Kabat) | | |
| SEQ ID NO: | HCDR1 | GYTFTSY |
| 2046 (Chothia) | | |
| SEQ ID NO: | HCDR2 | YPGNGD |
| 2047 (Chothia) | | |
| SEQ ID NO: | HCDR3 | SYFYGSSSWYFDV |
| 2045 (Chothia) | | |
| SEQ ID NO: | HCDR1 | GYTFTSYN |
| 2048 (IMGT) | | |
| SEQ ID NO: | HCDR2 | IYPGNGDT |
| 2049 (IMGT) | | |
| SEQ ID NO: | HCDR3 | ARSYFYGSSSWYFDV |
| 2050 (IMGT) | | |
| SEQ ID NO: | HCDR1 | GYTFTSYNMH |
| 2051 (Combined | | |
| Chothia and | | |
| Kabat) | | |
| SEQ ID NO: | HCDR2 | AIYPGNGDTSYNPKFKG |
| 2044 (Combined | | |
| Chothia and | | |
| Kabat) | | |
| SEQ ID NO: | HCDR3 | SYFYGSSSWYFDV |
| 2045 (Combined | | |
| Chothia and | | |
| Kabat) | | |
| SEQ ID NO: | VH | QVQLVQSGAEVKKPGSSVKVSCKASGYTFTSYNM |
| 2132 | | HWVRQAPGQGLEWMGAIYPGNGDTSYNPKFKGR |
| | | VTITADKSTRTAYMELSSLRSEDTAVYYCARSYFY |
| | | GSSSWYFDVWGQGTTVTVSS |
| SEQ ID NO: | DNA VH | CAAGTGCAACTCGTCCAGTCCGGTGCAGAAGTC |
| 2133 | | AAGAAGCCTGGTTCATCGGTGAAAGTGTCCTGC |
| | | AAAGCGTCGGGCTACACCTTCACCTCGTACAACA |
| | | TGCACTGGGTCCGCCAGGCCCCCGGACAAGGAC |
| | | TGGAATGGATGGGTGCTATCTACCCCGGAAACG |
| | | GAGATACCAGCTACAACCCCAAGTTCAAGGGAC |
| | | GCGTGACCATTACTGCCGACAAGTCCACAAGAA |
| | | CCGCCTACATGGAACTGTCCAGCCTGAGATCCGA |
| | | GGACACTGCGGTGTACTACTGTGCGAGGTCCTAC |
| | | TTCTACGGGTCCTCCTCTTGGTACTTCGACGTCTG |
| | | GGGACAGGGCACTACTGTGACCGTGTCCAGC |
| SEQ ID NO: | LCDR1 | RASSSVSSMH |
| 2054 (Kabat) | | |
| SEQ ID NO: | LCDR2 | ATSNLAS |
| 2031 (Kabat) | | |
| SEQ ID NO: | LCDR3 | QQWIFNPPT |
| 2055 (Kabat) | | |
| SEQ ID NO: | LCDR1 | SSSVSS |
| 2056 (Chothia) | | |
| SEQ ID NO: | LCDR2 | ATS |
| 2034 (Chothia) | | |
| SEQ ID NO: | LCDR3 | WIFNPP |
| 2057 (Chothia) | | |
| SEQ ID NO: | LCDR1 | SSVSS |
| 2036 (IMGT) | | |
| SEQ ID NO: | LCDR2 | ATS |
| 2034 (IMGT) | | |
| SEQ ID NO: | LCDR3 | QQWIFNPPT |
| 2055 (IMGT) | | |
| SEQ ID NO: | LCDR1 | RASSSVSSMH |
| 2054 (Combined | | |
| Chothia and | | |
| Kabat) | | |
| SEQ ID NO: | LCDR2 | ATSNLAS |
| 2031 (Combined | | |
| Chothia and | | |
| Kabat) | | |
| SEQ ID NO: | LCDR3 | QQWIFNPPT |
| 2055 (Combined | | |
| Chothia and | | |
| Kabat) | | |
| SEQ ID NO: | VL | EIVLTQSPATLSLSPGERATLSCRASSSVSSMHWYQ |
| 2058 | | QKPGQAPRPLIFATSNLASGIPARFSGSGSGTDYTLT |
| | | ISSLEPEDAAVYYCQQWIFNPPTFGGGTKVEIK |
| SEQ ID NO: | DNA VL | GAGATCGTGCTGACGCAGTCGCCGGCCACCCTG |
| 2134 | | AGCCTTTCACCGGGAGAACGCGCCACTCTGTCAT |
| | | GCCGGGCCAGCAGCTCCGTGTCCTCCATGCATTG |
| | | GTACCAGCAGAAGCCGGGGCAGGCCCCGCGGCC |
| | | TCTCATCTTCGCCACCTCCAATCTGGCCTCCGGC |
| | | ATCCCTGCTCGGTTTAGCGGAAGCGGCAGCGGA |
| | | ACTGACTATACCTTGACCATCTCCTCGCTGGAAC |
| | | CAGAGGATGCAGCCGTGTACTATTGCCAGCAGT |
| | | GGATCTTCAACCCGCCAACCTTCGGCGGCGGCAC |
| | | CAAGGTCGAGATTAAG |
| SEQ ID NO: | Linker | GGGGSGGGGSGGGGSGGGGS |
| 1010 | | |
| SEQ ID NO: | scFv (VH- | QVQLVQSGAEVKKPGSSVKVSCKASGYTFTSYNM |
| 2135 | linker-VL) | HWVRQAPGQGLEWMGAIYPGNGDTSYNPKFKGR |
| | | VTITADKSTRTAYMELSSLRSEDTAVYYCARSYFY |
| | | GSSSWYFDVWGQGTTVTVSSGGGGSGGGGSGGG |
| | | GSGGGGSEIVLTQSPATLSLSPGERATLSCRASSSVS |
| | | SMHWYQQKPGQAPRPLIFATSNLASGIPARFSGSGS |
| | | GTDYTLTISSLEPEDAAVYYCQQWIFNPPTFGGGTK |
| | | VEIK |
| SEQ ID NO: | DNA scFv | CAAGTGCAACTCGTCCAGTCCGGTGCAGAAGTCAAG |
| 2136 | (VH-linker- | AAGCCTGGTTCATCGGTGAAAGTGTCCTGCAAAGCGT |
| | VL) | CGGGCTACACCTTCACCTCGTACAACATGCACTGGGT |
| | | CCGCCAGGCCCCCGGACAAGGACTGGAATGGATGGG |
| | | TGCTATCTACCCCGGAAACGGAGATACCAGCTACAA |
| | | CCCCAAGTTCAAGGGACGCGTGACCATTACTGCCGAC |
| | | AAGTCCACAAGAACCGCCTACATGGAACTGTCCAGC |
| | | CTGAGATCCGAGGACACTGCGGTGTACTACTGTGCGA |
| | | GGTCCTACTTCTACGGGTCCTCCTCTTGGTACTTCGAC |
| | | GTCTGGGGACAGGGCACTACTGTGACCGTGTCCAGC |
| | | GGGGGAGGCGGTAGCGGGGGGGGTGGATCGGGCGG |
| | | CGGCGGATCAGGAGGAGGAGGGTCCGAGATCGTGCT |
| | | GACGCAGTCGCCGGCCACCCTGAGCCTTTCACCGGGA |
| | | GAACGCGCCACTCTGTCATGCCGGGCCAGCAGCTCCG |
| | | TGTCCTCCATGCATTGGTACCAGCAGAAGCCGGGGCA |
| | | GGCCCCGCGGCCTCTCATCTTCGCCACCTCCAATCTG |
| | | GCCTCCGGCATCCCTGCTCGGTTTAGCGGAAGCGGCA |
| | | GCGGAACTGACTATACCTTGACCATCTCCTCGCTGGA |
| | | ACCAGAGGATGCAGCCGTGTACTATTGCCAGCAGTG |
| | | GATCTTCAACCCGCCAACCTTCGGCGGCGGCACCAAG |
| | | GTCGAGATTAAG |
| SEQ ID NO: | Full CAR | MALPVTALLLPLALLLHAARPQVQLVQSGAEVKK |
| 2137 | amino acid | PGSSVKVSCKASGYTFTSYNMHWVRQAPGQGLE |
| | sequence | WMGAIYPGNGDTSYNPKFKGRVTITADKSTRTAY |
| | | MELSSLRSEDTAVYYCARSYFYGSSSWYFDVWGQ |
| | | GTTVTVSSGGGGSGGGGSGGGGSGGGGSEIVLTQS |
| | | PATLSLSPGERATLSCRASSSVSSMHWYQQKPGQA |
| | | PRPLIFATSNLASGIPARFSGSGSGTDYTLTISSLEPE |
| | | DAAVYYCQQWIFNPPTFGGGTKVEIKTTTPAPRPPT |
| | | PAPTIASQPLSLRPEACRPAAGGAVHTRGLDFACDI |
| | | YIWAPLAGTCGVLLLSLVITLYCKRGRKKLLYIFKQ |
| | | PFMRPVQTTQEEDGCSCRFPEEEEGGCELRVKFSRS |
| | | ADAPAYQQGQNQLYNELNLGRREEYDVLDKRRG |
| | | RDPEMGGKPRRKNPQEGLYNELQKDKMAEAYSEI |
| | | GMKGERRRGKGHDGLYQGLSTATKDTYDALHMQ |
| | | ALPPR |
| SEQ ID NO: | Full CAR | ATGGCCCTCCCTGTCACCGCCCTGCTGCTTCCGC |
| 2138 | nucleic acid | TGGCTCTTCTGCTCCACGCCGCTCGGCCCCAAGT |
| | sequence | GCAACTCGTCCAGTCCGGTGCAGAAGTCAAGAA |
| | | GCCTGGTTCATCGGTGAAAGTGTCCTGCAAAGCG |
| | | TCGGGCTACACCTTCACCTCGTACAACATGCACT |
| | | GGGTCCGCCAGGCCCCCGGACAAGGACTGGAAT |
| | | GGATGGGTGCTATCTACCCCGGAAACGGAGATA |
| | | CCAGCTACAACCCCAAGTTCAAGGGACGCGTGA |
| | | CCATTACTGCCGACAAGTCCACAAGAACCGCCT |
| | | ACATGGAACTGTCCAGCCTGAGATCCGAGGACA |
| | | CTGCGGTGTACTACTGTGCGAGGTCCTACTTCTA |
| | | CGGGTCCTCCTCTTGGTACTTCGACGTCTGGGGA |
| | | CAGGGCACTACTGTGACCGTGTCCAGCGGGGGA |
| | | GGCGGTAGCGGGGGGGGTGGATCGGGCGGCGGC |
| | | GGATCAGGAGGAGGAGGGTCCGAGATCGTGCTG |
| | | ACGCAGTCGCCGGCCACCCTGAGCCTTTCACCGG |
| | | GAGAACGCGCCACTCTGTCATGCCGGGCCAGCA |
| | | GCTCCGTGTCCTCCATGCATTGGTACCAGCAGAA |
| | | GCCGGGGCAGGCCCCGCGGCCTCTCATCTTCGCC |
| | | ACCTCCAATCTGGCCTCCGGCATCCCTGCTCGGT |
| | | TTAGCGGAAGCGGCAGCGGAACTGACTATACCT |
| | | TGACCATCTCCTCGCTGGAACCAGAGGATGCAG |
| | | CCGTGTACTATTGCCAGCAGTGGATCTTCAACCC |
| | | GCCAACCTTCGGCGGCGGCACCAAGGTCGAGAT |
| | | TAAGACCACTACCCCAGCACCGAGGCCACCCAC |
| | | CCCGGCTCCTACCATCGCCTCCCAGCCTCTGTCC |
| | | CTGCGTCCGGAGGCATGTAGACCCGCAGCTGGT |
| | | GGGGCCGTGCATACCCGGGGTCTTGACTTCGCCT |
| | | GCGATATCTACATTTGGGCCCCTCTGGCTGGTAC |
| | | TTGCGGGGTCCTGCTGCTTTCACTCGTGATCACT |
| | | CTTTACTGTAAGCGCGGTCGGAAGAAGCTGCTGT |
| | | ACATCTTTAAGCAACCCTTCATGAGGCCTGTGCA |
| | | GACTACTCAAGAGGAGGACGGCTGTTCATGCCG |
| | | GTTCCCAGAGGAGGAGGAAGGCGGCTGCGAACT |
| | | GCGCGTGAAATTCAGCCGCAGCGCAGATGCTCC |
| | | AGCCTACCAGCAGGGGCAGAACCAGCTCTACAA |
| | | CGAACTCAATCTTGGTCGGAGAGAGGAGTACGA |
| | | CGTGCTGGACAAGCGGAGAGGACGGGACCCAGA |
| | | AATGGGCGGGAAGCCGCGCAGAAAGAATCCCCA |
| | | AGAGGGCCTGTACAACGAGCTCCAAAAGGATAA |
| | | GATGGCAGAAGCCTATAGCGAGATTGGTATGAA |
| | | AGGGGAACGCAGAAGAGGCAAAGGCCACGACG |
| | | GACTGTACCAGGGACTCAGCACCGCCACCAAGG |
| | | ACACCTATGACGCTCTTCACATGCAGGCCCTGCC |
| | | GCCTCGG |
| CD20-C5H4 | | |
| SEQ ID NO: | HCDR1 | SYNMH |
| 2043 (Kabat) | | |
| SEQ ID NO: | HCDR2 | AIYPGNGDTSYNPKFKG |
| 2044 (Kabat) | | |
| SEQ ID NO: | HCDR3 | SYFYGSSSWYFDV |
| 2045 (Kabat) | | |
| SEQ ID NO: | HCDR1 | GYTFTSY |
| 2046 (Chothia) | | |
| SEQ ID NO: | HCDR2 | YPGNGD |
| 2047 (Chothia) | | |
| SEQ ID NO: | HCDR3 | SYFYGSSSWYFDV |
| 2045 (Chothia) | | |
| SEQ ID NO: | HCDR1 | GYTFTSYN |
| 2048 (IMGT) | | |
| SEQ ID NO: | HCDR2 | IYPGNGDT |
| 2049 (IMGT) | | |
| SEQ ID NO: | HCDR3 | ARSYFYGSSSWYFDV |
| 2050 (IMGT) | | |
| SEQ ID NO: | HCDR1 | GYTFTSYNMH |
| 2051 (Combined | | |
| Chothia and | | |
| Kabat) | | |
| SEQ ID NO: | HCDR2 | AIYPGNGDTSYNPKFKG |
| 2044 (Combined | | |
| Chothia and | | |
| Kabat) | | |
| SEQ ID NO: | HCDR3 | SYFYGSSSWYFDV |
| 2045 (Combined | | |
| Chothia and | | |
| Kabat) | | |
| SEQ ID NO: | VH | QVQLVQSGAEVKKPGSSVKVSCKASGYTFTSYNM |
| 2132 | | HWVRQAPGQGLEWMGAIYPGNGDTSYNPKFKGR |
| | | VTITADKSTRTAYMELSSLRSEDTAVYYCARSYFY |
| | | GSSSWYFDVWGQGTTVTVSS |
| SEQ ID NO: | DNA VH | CAAGTGCAACTCGTCCAGTCCGGTGCAGAAGTC |
| 2139 | | AAGAAGCCAGGTTCCTCGGTGAAAGTGTCCTGC |
| | | AAAGCCTCGGGTTACACCTTCACCTCGTACAATA |
| | | TGCACTGGGTCCGCCAAGCTCCGGGACAAGGCC |
| | | TGGAATGGATGGGAGCGATCTACCCCGGAAACG |
| | | GCGACACGTCCTACAACCCGAAGTTCAAGGGAA |
| | | GAGTGACCATCACCGCCGACAAGTCCACCCGCA |
| | | CCGCGTACATGGAGCTTAGCAGCCTGCGGAGCG |
| | | AGGACACTGCCGTGTATTACTGCGCCCGGTCCTA |
| | | CTTCTATGGATCATCCTCGTGGTACTTCGATGTCT |
| | | GGGGCCAGGGGACCACCGTGACCGTGTCCAGC |
| SEQ ID NO: | LCDR1 | RASSSVSSMH |
| 2054 (Kabat) | | |
| SEQ ID NO: | LCDR2 | ATSNLAS |
| 2031 (Kabat) | | |
| SEQ ID NO: | LCDR3 | QQWIFNPPT |
| 2055 (Kabat) | | |
| SEQ ID NO: | LCDR1 | SSSVSS |
| 2056 (Chothia) | | |
| SEQ ID NO: | LCDR2 | ATS |
| 2034 (Chothia) | | |
| SEQ ID NO: | LCDR3 | WIFNPP |
| 2057 (Chothia) | | |
| SEQ ID NO: | LCDR1 | SSVSS |
| 2036 (IMGT) | | |
| SEQ ID NO: | LCDR2 | ATS |
| 2034 (IMGT) | | |
| SEQ ID NO: | LCDR3 | QQWIFNPPT |
| 2055 (IMGT) | | |
| SEQ ID NO: | LCDR1 | RASSSVSSMH |
| 2054 (Combined | | |
| Chothia and | | |
| Kabat) | | |
| SEQ ID NO: | LCDR2 | ATSNLAS |
| 2031 (Combined | | |
| Chothia and | | |
| Kabat) | | |
| SEQ ID NO: | LCDR3 | QQWIFNPPT |
| 2055 (Combined | | |
| Chothia and | | |
| Kabat) | | |
| SEQ ID NO: | VL | DIQLTQSPSFLSASVGDRVTITCRASSSVSSMHWYQ |
| 2126 | | QKPGKAPKPLIFATSNLASGVPSRFSGSGSGTEYTL |
| | | TISSLQPEDFATYYCQQWIFNPPTFGGGTKVEIK |
| SEQ ID NO: | DNA VL | GATATCCAGCTGACCCAGAGCCCTTCCTTCCTGT |
| 2140 | | CCGCTTCCGTGGGAGACAGAGTCACTATTACTTG |
| | | TCGGGCCTCCTCATCCGTGTCATCCATGCACTGG |
| | | TACCAGCAGAAGCCGGGAAAGGCCCCAAAGCCC |
| | | TTGATCTTTGCCACTTCCAACCTGGCATCCGGCG |
| | | TGCCCTCGAGGTTCTCCGGGAGCGGTTCAGGGAC |
| | | CGAGTACACTCTGACCATTAGCAGCCTCCAGCCT |
| | | GAGGACTTTGCCACCTACTACTGCCAGCAGTGGA |
| | | TTTTCAACCCGCCTACATTCGGAGGGGGCACTAA |
| | | GGTCGAAATCAAG |
| SEQ ID NO: | Linker | GGGGSGGGGSGGGGSGGGGS |
| 1010 | | |
| SEQ ID NO: | scFv (VH- | QVQLVQSGAEVKKPGSSVKVSCKASGYTFTSYNM |
| 2141 | linker-VL) | HWVRQAPGQGLEWMGAIYPGNGDTSYNPKFKGR |
| | | VTITADKSTRTAYMELSSLRSEDTAVYYCARSYFY |
| | | GSSSWYFDVWGQGTTVTVSSGGGGSGGGGSGGG |
| | | GSGGGGSDIQLTQSPSFLSASVGDRVTITCRASSSVS |
| | | SMHWYQQKPGKAPKPLIFATSNLASGVPSRFSGSG |
| | | SGTEYTLTISSLQPEDFATYYCQQWIFNPPTFGGGT |
| | | KVEIK |
| SEQ ID NO: | DNA scFv | CAAGTGCAACTCGTCCAGTCCGGTGCAGAAGTCAAG |
| 2142 | (VH-linker- | AAGCCAGGTTCCTCGGTGAAAGTGTCCTGCAAAGCCT |
| | VL) | CGGGTTACACCTTCACCTCGTACAATATGCACTGGGT |
| | | CCGCCAAGCTCCGGGACAAGGCCTGGAATGGATGGG |
| | | AGCGATCTACCCCGGAAACGGCGACACGTCCTACAA |
| | | CCCGAAGTTCAAGGGAAGAGTGACCATCACCGCCGA |
| | | CAAGTCCACCCGCACCGCGTACATGGAGCTTAGCAG |
| | | CCTGCGGAGCGAGGACACTGCCGTGTATTACTGCGCC |
| | | CGGTCCTACTTCTATGGATCATCCTCGTGGTACTTCG |
| | | ATGTCTGGGGCCAGGGGACCACCGTGACCGTGTCCA |
| | | GCGGTGGCGGAGGCAGCGGCGGAGGAGGGTCTGGAG |
| | | GAGGCGGCTCGGGGGGAGGGGGCTCGGATATCCAGC |
| | | TGACCCAGAGCCCTTCCTTCCTGTCCGCTTCCGTGGG |
| | | AGACAGAGTCACTATTACTTGTCGGGCCTCCTCATCC |
| | | GTGTCATCCATGCACTGGTACCAGCAGAAGCCGGGA |
| | | AAGGCCCCAAAGCCCTTGATCTTTGCCACTTCCAACC |
| | | TGGCATCCGGCGTGCCCTCGAGGTTCTCCGGGAGCGG |
| | | TTCAGGGACCGAGTACACTCTGACCATTAGCAGCCTC |
| | | CAGCCTGAGGACTTTGCCACCTACTACTGCCAGCAGT |
| | | GGATTTTCAACCCGCCTACATTCGGAGGGGGCACTAA |
| | | GGTCGAAATCAAG |
| SEQ ID NO: | Full CAR | MALPVTALLLPLALLLHAARPQVQLVQSGAEVKK |
| 2143 | amino acid | PGSSVKVSCKASGYTFTSYNMHWVRQAPGQGLE |
| | sequence | WMGAIYPGNGDTSYNPKFKGRVTITADKSTRTAY |
| | | MELSSLRSEDTAVYYCARSYFYGSSSWYFDVWGQ |
| | | GTTVTVSSGGGGSGGGGSGGGGSGGGGSDIQLTQS |
| | | PSFLSASVGDRVTITCRASSSVSSMHWYQQKPGKA |
| | | PKPLIFATSNLASGVPSRFSGSGSGTEYTLTISSLQPE |
| | | DFATYYCQQWIFNPPTFGGGTKVEIKTTTPAPRPPT |
| | | PAPTIASQPLSLRPEACRPAAGGAVHTRGLDFACDI |
| | | YIWAPLAGTCGVLLLSLVITLYCKRGRKKLLYIFKQ |
| | | PFMRPVQTTQEEDGCSCRFPEEEEGGCELRVKFSRS |
| | | ADAPAYQQGQNQLYNELNLGRREEYDVLDKRRG |
| | | RDPEMGGKPRRKNPQEGLYNELQKDKMAEAYSEI |
| | | GMKGERRRGKGHDGLYQGLSTATKDTYDALHMQ |
| | | ALPPR |
| SEQ ID NO: | Full CAR | ATGGCCCTCCCTGTCACCGCCCTGCTGCTTCCGC |
| 2144 | nucleic acid | TGGCTCTTCTGCTCCACGCCGCTCGGCCCCAAGT |
| | sequence | GCAACTCGTCCAGTCCGGTGCAGAAGTCAAGAA |
| | | GCCAGGTTCCTCGGTGAAAGTGTCCTGCAAAGCC |
| | | TCGGGTTACACCTTCACCTCGTACAATATGCACT |
| | | GGGTCCGCCAAGCTCCGGGACAAGGCCTGGAAT |
| | | GGATGGGAGCGATCTACCCCGGAAACGGCGACA |
| | | CGTCCTACAACCCGAAGTTCAAGGGAAGAGTGA |
| | | CCATCACCGCCGACAAGTCCACCCGCACCGCGT |
| | | ACATGGAGCTTAGCAGCCTGCGGAGCGAGGACA |
| | | CTGCCGTGTATTACTGCGCCCGGTCCTACTTCTA |
| | | TGGATCATCCTCGTGGTACTTCGATGTCTGGGGC |
| | | CAGGGGACCACCGTGACCGTGTCCAGCGGTGGC |
| | | GGAGGCAGCGGCGGAGGAGGGTCTGGAGGAGG |
| | | CGGCTCGGGGGGAGGGGGCTCGGATATCCAGCT |
| | | GACCCAGAGCCCTTCCTTCCTGTCCGCTTCCGTG |
| | | GGAGACAGAGTCACTATTACTTGTCGGGCCTCCT |
| | | CATCCGTGTCATCCATGCACTGGTACCAGCAGAA |
| | | GCCGGGAAAGGCCCCAAAGCCCTTGATCTTTGCC |
| | | ACTTCCAACCTGGCATCCGGCGTGCCCTCGAGGT |
| | | TCTCCGGGAGCGGTTCAGGGACCGAGTACACTCT |
| | | GACCATTAGCAGCCTCCAGCCTGAGGACTTTGCC |
| | | ACCTACTACTGCCAGCAGTGGATTTTCAACCCGC |
| | | CTACATTCGGAGGGGGCACTAAGGTCGAAATCA |
| | | AGACCACTACCCCAGCACCGAGGCCACCCACCC |
| | | CGGCTCCTACCATCGCCTCCCAGCCTCTGTCCCT |
| | | GCGTCCGGAGGCATGTAGACCCGCAGCTGGTGG |
| | | GGCCGTGCATACCCGGGGTCTTGACTTCGCCTGC |
| | | GATATCTACATTTGGGCCCCTCTGGCTGGTACTT |
| | | GCGGGGTCCTGCTGCTTTCACTCGTGATCACTCT |
| | | TTACTGTAAGCGCGGTCGGAAGAAGCTGCTGTA |
| | | CATCTTTAAGCAACCCTTCATGAGGCCTGTGCAG |
| | | ACTACTCAAGAGGAGGACGGCTGTTCATGCCGG |
| | | TTCCCAGAGGAGGAGGAAGGCGGCTGCGAACTG |
| | | CGCGTGAAATTCAGCCGCAGCGCAGATGCTCCA |
| | | GCCTACCAGCAGGGGCAGAACCAGCTCTACAAC |
| | | GAACTCAATCTTGGTCGGAGAGAGGAGTACGAC |
| | | GTGCTGGACAAGCGGAGAGGACGGGACCCAGAA |
| | | ATGGGCGGGAAGCCGCGCAGAAAGAATCCCCAA |
| | | GAGGGCCTGTACAACGAGCTCCAAAAGGATAAG |
| | | ATGGCAGAAGCCTATAGCGAGATTGGTATGAAA |
| | | GGGGAACGCAGAAGAGGCAAAGGCCACGACGG |
| | | ACTGTACCAGGGACTCAGCACCGCCACCAAGGA |
| | | CACCTATGACGCTCTTCACATGCAGGCCCTGCCG |
| | | CCTCGG |
| CD20-C8H1 | | |
| SEQ ID NO: | HCDR1 | RYNMH |
| 2145 (Kabat) | | |
| SEQ ID NO: | HCDR2 | AIYPGNGDTSYSQKFKG |
| 2146 (Kabat) | | |
| SEQ ID NO: | HCDR3 | SFFYGSSDWYFDV |
| 2147 (Kabat) | | |
| SEQ ID NO: | HCDR1 | GYTFTRY |
| 2148 (Chothia) | | |
| SEQ ID NO: | HCDR2 | YPGNGD |
| 2047 (Chothia) | | |
| SEQ ID NO: | HCDR3 | SFFYGSSDWYFDV |
| 2147 (Chothia) | | |
| SEQ ID NO: | HCDR1 | GYTFTRYN |
| 2149 (IMGT) | | |
| SEQ ID NO: | HCDR2 | IYPGNGDT |
| 2049 (IMGT) | | |
| SEQ ID NO: | HCDR3 | ARSFFYGSSDWYFDV |
| 2150 (IMGT) | | |
| SEQ ID NO: | HCDR1 | GYTFTRYNMH |
| 2151 (Combined | | |
| Chothia and | | |
| Kabat) | | |
| SEQ ID NO: | HCDR2 | AIYPGNGDTSYSQKFKG |
| 2146 (Combined | | |
| Chothia and | | |
| Kabat) | | |
| SEQ ID NO: | HCDR3 | SFFYGSSDWYFDV |
| 2147 (Combined | | |
| Chothia and | | |
| Kabat) | | |
| SEQ ID NO: | VH | QVQLVQSGAEVKKPGASVKVSCKASGYTFTRYNM |
| 2152 | | HWVRQAPGQRLEWMGAIYPGNGDTSYSQKFKGR |
| | | VTITADKSASTAYMELSSLRSEDTAVYYCARSFFY |
| | | GSSDWYFDVWGQGTTVTVSS |
| SEQ ID NO: | DNA VH | CAAGTCCAACTCGTCCAGTCAGGAGCAGAAGTC |
| 2153 | | AAGAAACCAGGAGCATCCGTGAAAGTGTCGTGC |
| | | AAAGCCTCTGGCTACACCTTCACCCGGTACAACA |
| | | TGCACTGGGTCAGACAGGCCCCGGGACAGCGGC |
| | | TCGAGTGGATGGGTGCCATCTACCCCGGCAACG |
| | | GGGACACCTCCTACTCCCAAAAGTTCAAGGGTC |
| | | GCGTGACCATCACGGCGGATAAGTCGGCCAGCA |
| | | CTGCGTACATGGAATTGTCATCCCTGCGCTCCGA |
| | | GGATACCGCCGTGTATTACTGCGCGCGGTCCTTC |
| | | TTCTACGGCTCCTCCGATTGGTACTTCGACGTCT |
| | | GGGGACAGGGAACTACCGTGACCGTGTCCTCC |
| SEQ ID NO: | LCDR1 | RASSSVNNMH |
| 2154 (Kabat) | | |
| SEQ ID NO: | LCDR2 | ATSNLAS |
| 2031 (Kabat) | | |
| SEQ ID NO: | LCDR3 | QQWIFNPPT |
| 2055 (Kabat) | | |
| SEQ ID NO: | LCDR1 | SSSVNN |
| 2155 (Chothia) | | |
| SEQ ID NO: | LCDR2 | ATS |
| 2034 (Chothia) | | |
| SEQ ID NO: | LCDR3 | WIFNPP |
| 2057 (Chothia) | | |
| SEQ ID NO: | LCDR1 | SSVNN |
| 2156 (IMGT) | | |
| SEQ ID NO: | LCDR2 | ATS |
| 2034 (IMGT) | | |
| SEQ ID NO: | LCDR3 | QQWIFNPPT |
| 2055 (IMGT) | | |
| SEQ ID NO: | LCDR1 | RASSSVNNMH |
| 2154 (Combined | | |
| Chothia and | | |
| Kabat) | | |
| SEQ ID NO: | LCDR2 | ATSNLAS |
| 2031 (Combined | | |
| Chothia and | | |
| Kabat) | | |
| SEQ ID NO: | LCDR3 | QQWIFNPPT |
| 2055 (Combined | | |
| Chothia and | | |
| Kabat) | | |
| SEQ ID NO: | VL | EIVLTQSPDFQSVTPKEKVTITCRASSSVNNMHWY |
| 2157 | | QQKPDQSPKPLIYATSNLASGVPSRFSGSGSGTDYT |
| | | LTINSLEAEDAATYYCQQWWNPPTFGQGTKLEIK |
| SEQ ID NO: | DNA VL | GAAATCGTGCTGACTCAGTCGCCGGACTTCCAAA |
| 2158 | | GCGTGACCCCAAAGGAGAAGGTCACCATCACCT |
| | | GTAGAGCCTCATCGTCCGTGAACAATATGCACTG |
| | | GTACCAGCAGAAGCCGGACCAGTCCCCTAAGCC |
| | | CCTGATCTACGCCACTTCCAACCTGGCCTCCGGC |
| | | GTGCCGTCGAGGTTCAGCGGCTCGGGCAGCGGG |
| | | ACCGACTACACCCTGACCATCAACAGCCTTGAA |
| | | GCTGAGGACGCCGCTACCTACTACTGCCAGCAGT |
| | | GGATTTTCAACCCTCCCACATTTGGACAGGGCAC |
| | | TAAGCTGGAGATTAAG |
| SEQ ID NO: | Linker | GGGGSGGGGSGGGGSGGGGS |
| 1010 | | |
| SEQ ID NO: | scFv (VH- | QVQLVQSGAEVKKPGASVKVSCKASGYTFTRYNM |
| 2159 | linker-VL) | HWVRQAPGQRLEWMGAIYPGNGDTSYSQKFKGR |
| | | VTITADKSASTAYMELSSLRSEDTAVYYCARSFFY |
| | | GSSDWYFDVWGQGTTVTVSSGGGGSGGGGSGGG |
| | | GSGGGGSEIVLTQSPDFQSVTPKEKVTITCRASSSV |
| | | NNMHWYQQKPDQSPKPLIYATSNLASGVPSRFSGS |
| | | GSGTDYTLTINSLEAEDAATYYCQQWIFNPPTFGQ |
| | | GTKLEIK |
| SEQ ID NO: | DNA scFv | CAAGTCCAACTCGTCCAGTCAGGAGCAGAAGTCAAG |
| 2160 | (VH-linker- | AAACCAGGAGCATCCGTGAAAGTGTCGTGCAAAGCC |
| | VL) | TCTGGCTACACCTTCACCCGGTACAACATGCACTGGG |
| | | TCAGACAGGCCCCGGGACAGCGGCTCGAGTGGATGG |
| | | GTGCCATCTACCCCGGCAACGGGGACACCTCCTACTC |
| | | CCAAAAGTTCAAGGGTCGCGTGACCATCACGGCGGA |
| | | TAAGTCGGCCAGCACTGCGTACATGGAATTGTCATCC |
| | | CTGCGCTCCGAGGATACCGCCGTGTATTACTGCGCGC |
| | | GGTCCTTCTTCTACGGCTCCTCCGATTGGTACTTCGAC |
| | | GTCTGGGGACAGGGAACTACCGTGACCGTGTCCTCCG |
| | | GGGGTGGCGGGAGCGGAGGGGGCGGAAGCGGGGGT |
| | | GGAGGATCAGGAGGCGGAGGCTCCGAAATCGTGCTG |
| | | ACTCAGTCGCCGGACTTCCAAAGCGTGACCCCAAAG |
| | | GAGAAGGTCACCATCACCTGTAGAGCCTCATCGTCCG |
| | | TGAACAATATGCACTGGTACCAGCAGAAGCCGGACC |
| | | AGTCCCCTAAGCCCCTGATCTACGCCACTTCCAACCT |
| | | GGCCTCCGGCGTGCCGTCGAGGTTCAGCGGCTCGGGC |
| | | AGCGGGACCGACTACACCCTGACCATCAACAGCCTT |
| | | GAAGCTGAGGACGCCGCTACCTACTACTGCCAGCAG |
| | | TGGATTTTCAACCCTCCCACATTTGGACAGGGCACTA |
| | | AGCTGGAGATTAAG |
| SEQ ID NO: | Full CAR | MALPVTALLLPLALLLHAARPQVQLVQSGAEVKK |
| 2161 | amino acid | PGASVKVSCKASGYTFTRYNMHWVRQAPGQRLE |
| | sequence | WMGAIYPGNGDTSYSQKFKGRVTITADKSASTAY |
| | | MELSSLRSEDTAVYYCARSFFYGSSDWYFDVWGQ |
| | | GTTVTVSSGGGGSGGGGSGGGGSGGGGSEIVLTQS |
| | | PDFQSVTPKEKVTITCRASSSVNNMHWYQQKPDQS |
| | | PKPLIYATSNLASGVPSRFSGSGSGTDYTLTINSLEA |
| | | EDAATYYCQQWIFNPPTFGQGTKLEIKTTTPAPRPP |
| | | TPAPTIASQPLSLRPEACRPAAGGAVHTRGLDFACD |
| | | IYIWAPLAGTCGVLLLSLVITLYCKRGRKKLLYIFK |
| | | QPFMRPVQTTQEEDGCSCRFPEEEEGGCELRVKFS |
| | | RSADAPAYQQGQNQLYNELNLGRREEYDVLDKRR |
| | | GRDPEMGGKPRRKNPQEGLYNELQKDKMAEAYS |
| | | EIGMKGERRRGKGHDGLYQGLSTATKDTYDALH |
| | | MQALPPR |
| SEQ ID NO: | Full CAR | ATGGCCCTCCCTGTCACCGCCCTGCTGCTTCCGC |
| 2162 | nucleic acid | TGGCTCTTCTGCTCCACGCCGCTCGGCCCCAAGT |
| | sequence | CCAACTCGTCCAGTCAGGAGCAGAAGTCAAGAA |
| | | ACCAGGAGCATCCGTGAAAGTGTCGTGCAAAGC |
| | | CTCTGGCTACACCTTCACCCGGTACAACATGCAC |
| | | TGGGTCAGACAGGCCCCGGGACAGCGGCTCGAG |
| | | TGGATGGGTGCCATCTACCCCGGCAACGGGGAC |
| | | ACCTCCTACTCCCAAAAGTTCAAGGGTCGCGTGA |
| | | CCATCACGGCGGATAAGTCGGCCAGCACTGCGT |
| | | ACATGGAATTGTCATCCCTGCGCTCCGAGGATAC |
| | | CGCCGTGTATTACTGCGCGCGGTCCTTCTTCTAC |
| | | GGCTCCTCCGATTGGTACTTCGACGTCTGGGGAC |
| | | AGGGAACTACCGTGACCGTGTCCTCCGGGGGTG |
| | | GCGGGAGCGGAGGGGGCGGAAGCGGGGGTGGA |
| | | GGATCAGGAGGCGGAGGCTCCGAAATCGTGCTG |
| | | ACTCAGTCGCCGGACTTCCAAAGCGTGACCCCA |
| | | AAGGAGAAGGTCACCATCACCTGTAGAGCCTCA |
| | | TCGTCCGTGAACAATATGCACTGGTACCAGCAG |
| | | AAGCCGGACCAGTCCCCTAAGCCCCTGATCTACG |
| | | CCACTTCCAACCTGGCCTCCGGCGTGCCGTCGAG |
| | | GTTCAGCGGCTCGGGCAGCGGGACCGACTACAC |
| | | CCTGACCATCAACAGCCTTGAAGCTGAGGACGC |
| | | CGCTACCTACTACTGCCAGCAGTGGATTTTCAAC |
| | | CCTCCCACATTTGGACAGGGCACTAAGCTGGAG |
| | | ATTAAGACCACTACCCCAGCACCGAGGCCACCC |
| | | ACCCCGGCTCCTACCATCGCCTCCCAGCCTCTGT |
| | | CCCTGCGTCCGGAGGCATGTAGACCCGCAGCTG |
| | | GTGGGGCCGTGCATACCCGGGGTCTTGACTTCGC |
| | | CTGCGATATCTACATTTGGGCCCCTCTGGCTGGT |
| | | ACTTGCGGGGTCCTGCTGCTTTCACTCGTGATCA |
| | | CTCTTTACTGTAAGCGCGGTCGGAAGAAGCTGCT |
| | | GTACATCTTTAAGCAACCCTTCATGAGGCCTGTG |
| | | CAGACTACTCAAGAGGAGGACGGCTGTTCATGC |
| | | CGGTTCCCAGAGGAGGAGGAAGGCGGCTGCGAA |
| | | CTGCGCGTGAAATTCAGCCGCAGCGCAGATGCT |
| | | CCAGCCTACCAGCAGGGGCAGAACCAGCTCTAC |
| | | AACGAACTCAATCTTGGTCGGAGAGAGGAGTAC |
| | | GACGTGCTGGACAAGCGGAGAGGACGGGACCCA |
| | | GAAATGGGCGGGAAGCCGCGCAGAAAGAATCCC |
| | | CAAGAGGGCCTGTACAACGAGCTCCAAAAGGAT |
| | | AAGATGGCAGAAGCCTATAGCGAGATTGGTATG |
| | | AAAGGGGAACGCAGAAGAGGCAAAGGCCACGA |
| | | CGGACTGTACCAGGGACTCAGCACCGCCACCAA |
| | | GGACACCTATGACGCTCTTCACATGCAGGCCCTG |
| | | CCGCCTCGG |
| CD20-C8H2 | | |
| SEQ ID NO: | HCDR1 | RYNMH |
| 2145 (Kabat) | | |
| SEQ ID NO: | HCDR2 | AIYPGNGDTSYSQKFKG |
| 2146 (Kabat) | | |
| SEQ ID NO: | HCDR3 | SFFYGSSDWYFDV |
| 2147 (Kabat) | | |
| SEQ ID NO: | HCDR1 | GYTFTRY |
| 2148 (Chothia) | | |
| SEQ ID NO: | HCDR2 | YPGNGD |
| 2047 (Chothia) | | |
| SEQ ID NO: | HCDR3 | SFFYGSSDWYFDV |
| 2147 (Chothia) | | |
| SEQ ID NO: | HCDR1 | GYTFTRYN |
| 2149 (IMGT) | | |
| SEQ ID NO: | HCDR2 | IYPGNGDT |
| 2049 (IMGT) | | |
| SEQ ID NO: | HCDR3 | ARSFFYGSSDWYFDV |
| 2150 (IMGT) | | |
| SEQ ID NO: | HCDR1 | GYTFTRYNMH |
| 2151 (Combined | | |
| Chothia and | | |
| Kabat) | | |
| SEQ ID NO: | HCDR2 | AIYPGNGDTSYSQKFKG |
| 2146 (Combined | | |
| Chothia and | | |
| Kabat) | | |
| SEQ ID NO: | HCDR3 | SFFYGSSDWYFDV |
| 2147 (Combined | | |
| Chothia and | | |
| Kabat) | | |
| SEQ ID NO: | VH | QVQLVQSGAEVKKPGASVKVSCKASGYTFTRYNM |
| 2152 | | HWVRQAPGQRLEWMGAIYPGNGDTSYSQKFKGR |
| | | VTITADKSASTAYMELSSLRSEDTAVYYCARSFFY |
| | | GSSDWYFDVWGQGTTVTVSS |
| SEQ ID NO: | DNA VH | CAAGTGCAACTCGTCCAATCCGGCGCGGAAGTC |
| 2163 | | AAAAAGCCTGGAGCCTCCGTCAAAGTGTCCTGC |
| | | AAGGCCTCCGGTTACACTTTCACTCGCTACAACA |
| | | TGCATTGGGTGCGGCAGGCCCCGGGACAGCGCC |
| | | TGGAATGGATGGGCGCAATCTACCCCGGCAACG |
| | | GAGACACCTCCTATTCCCAAAAGTTCAAGGGAA |
| | | GGGTCACAATCACGGCCGACAAGAGCGCCTCAA |
| | | CTGCCTACATGGAGCTGAGCAGCCTCAGATCCG |
| | | AAGATACCGCGGTGTACTACTGCGCCCGGAGCTT |
| | | CTTCTACGGTTCGTCTGATTGGTACTTTGACGTCT |
| | | GGGGCCAGGGAACCACCGTGACCGTGTCGTCC |
| SEQ ID NO: | LCDR1 | RASSSVNNMH |
| 2154 (Kabat) | | |
| SEQ ID NO: | LCDR2 | ATSNLAS |
| 2031 (Kabat) | | |
| SEQ ID NO: | LCDR3 | QQWIFNPPT |
| 2055 (Kabat) | | |
| SEQ ID NO: | LCDR1 | SSSVNN |
| 2155 (Chothia) | | |
| SEQ ID NO: | LCDR2 | ATS |
| 2034 (Chothia) | | |
| SEQ ID NO: | LCDR3 | WIFNPP |
| 2057 (Chothia) | | |
| SEQ ID NO: | LCDR1 | SSVNN |
| 2156 (IMGT) | | |
| SEQ ID NO: | LCDR2 | ATS |
| 2034 (IMGT) | | |
| SEQ ID NO: | LCDR3 | QQWIFNPPT |
| 2055 (IMGT) | | |
| SEQ ID NO: | LCDR1 | RASSSVNNMH |
| 2154 (Combined | | |
| Chothia and | | |
| Kabat) | | |
| SEQ ID NO: | LCDR2 | ATSNLAS |
| 2031 (Combined | | |
| Chothia and | | |
| Kabat) | | |
| SEQ ID NO: | LCDR3 | QQWIFNPPT |
| 2055 (Combined | | |
| Chothia and | | |
| Kabat) | | |
| SEQ ID NO: | VL | DIQLTQSPSFLSASVGDRVTITCRASSSVNNMHWY |
| 2164 | | QQKPGKAPKPLIYATSNLASGVPSRFSGSGSGTEYT |
| | | LTISSLQPEDFATYYCQQWIFNPPTFGQGTKLEIK |
| SEQ ID NO: | DNA VL | GACATCCAGCTTACCCAGTCGCCATCATTCCTGT |
| 2165 | | CCGCATCAGTGGGTGATCGCGTGACCATTACCTG |
| | | TCGGGCGTCCTCCTCCGTGAACAACATGCACTGG |
| | | TACCAGCAGAAGCCGGGGAAGGCTCCCAAGCCT |
| | | CTGATCTACGCCACTAGCAATTTGGCCAGCGGCG |
| | | TGCCTTCGAGATTCTCGGGGTCGGGCTCAGGAAC |
| | | CGAGTATACCCTGACCATTTCCTCCCTCCAACCG |
| | | GAGGACTTTGCTACTTACTACTGCCAGCAGTGGA |
| | | TTTTCAACCCCCCGACTTTCGGACAGGGCACCAA |
| | | GCTGGAAATCAAG |
| SEQ ID NO: | Linker | GGGGSGGGGSGGGGSGGGGS |
| 1010 | | |
| SEQ ID NO: | scFv (VH- | QVQLVQSGAEVKKPGASVKVSCKASGYTFTRYNM |
| 2166 | linker-VL) | HWVRQAPGQRLEWMGAIYPGNGDTSYSQKFKGR |
| | | VTITADKSASTAYMELSSLRSEDTAVYYCARSFFY |
| | | GSSDWYFDVWGQGTTVTVSSGGGGSGGGGSGGG |
| | | GSGGGGSDIQLTQSPSFLSASVGDRVTITCRASSSV |
| | | NNMHWYQQKPGKAPKPLIYATSNLASGVPSRFSGS |
| | | GSGTEYTLTISSLQPEDFATYYCQQWIFNPPTFGQG |
| | | TKLEIK |
| SEQ ID NO: | DNA scFv | CAAGTGCAACTCGTCCAATCCGGCGCGGAAGTCAAA |
| 2167 | (VH-linker- | AAGCCTGGAGCCTCCGTCAAAGTGTCCTGCAAGGCCT |
| | VL) | CCGGTTACACTTTCACTCGCTACAACATGCATTGGGT |
| | | GCGGCAGGCCCCGGGACAGCGCCTGGAATGGATGGG |
| | | CGCAATCTACCCCGGCAACGGAGACACCTCCTATTCC |
| | | CAAAAGTTCAAGGGAAGGGTCACAATCACGGCCGAC |
| | | AAGAGCGCCTCAACTGCCTACATGGAGCTGAGCAGC |
| | | CTCAGATCCGAAGATACCGCGGTGTACTACTGCGCCC |
| | | GGAGCTTCTTCTACGGTTCGTCTGATTGGTACTTTGAC |
| | | GTCTGGGGCCAGGGAACCACCGTGACCGTGTCGTCC |
| | | GGTGGCGGAGGGAGCGGTGGAGGAGGCTCCGGGGG |
| | | AGGAGGCAGCGGCGGGGGAGGCAGCGACATCCAGCT |
| | | TACCCAGTCGCCATCATTCCTGTCCGCATCAGTGGGT |
| | | GATCGCGTGACCATTACCTGTCGGGCGTCCTCCTCCG |
| | | TGAACAACATGCACTGGTACCAGCAGAAGCCGGGGA |
| | | AGGCTCCCAAGCCTCTGATCTACGCCACTAGCAATTT |
| | | GGCCAGCGGCGTGCCTTCGAGATTCTCGGGGTCGGGC |
| | | TCAGGAACCGAGTATACCCTGACCATTTCCTCCCTCC |
| | | AACCGGAGGACTTTGCTACTTACTACTGCCAGCAGTG |
| | | GATTTTCAACCCCCCGACTTTCGGACAGGGCACCAAG |
| | | CTGGAAATCAAG |
| SEQ ID NO: | Full CAR | MALPVTALLLPLALLLHAARPQVQLVQSGAEVKK |
| 2168 | amino acid | PGASVKVSCKASGYTFTRYNMHWVRQAPGQRLE |
| | sequence | WMGAIYPGNGDTSYSQKFKGRVTITADKSASTAY |
| | | MELSSLRSEDTAVYYCARSFFYGSSDWYFDVWGQ |
| | | GTTVTVSSGGGGSGGGGSGGGGSGGGGSDIQLTQS |
| | | PSFLSASVGDRVTITCRASSSVNNMHWYQQKPGK |
| | | APKPLIYATSNLASGVPSRFSGSGSGTEYTLTISSLQ |
| | | PEDFATYYCQQWIFNPPTFGQGTKLEIKTTTPAPRP |
| | | PTPAPTIASQPLSLRPEACRPAAGGAVHTRGLDFAC |
| | | DIYIWAPLAGTCGVLLLSLVITLYCKRGRKKLLYIF |
| | | KQPFMRPVQTTQEEDGCSCRFPEEEEGGCELRVKF |
| | | SRSADAPAYQQGQNQLYNELNLGRREEYDVLDKR |
| | | RGRDPEMGGKPRRKNPQEGLYNELQKDKMAEAY |
| | | SEIGMKGERRRGKGHDGLYQGLSTATKDTYDALH |
| | | MQALPPR |
| SEQ ID NO: | Full CAR | ATGGCCCTCCCTGTCACCGCCCTGCTGCTTCCGC |
| 2169 | nucleic acid | TGGCTCTTCTGCTCCACGCCGCTCGGCCCCAAGT |
| | sequence | GCAACTCGTCCAATCCGGCGCGGAAGTCAAAAA |
| | | GCCTGGAGCCTCCGTCAAAGTGTCCTGCAAGGCC |
| | | TCCGGTTACACTTTCACTCGCTACAACATGCATT |
| | | GGGTGCGGCAGGCCCCGGGACAGCGCCTGGAAT |
| | | GGATGGGCGCAATCTACCCCGGCAACGGAGACA |
| | | CCTCCTATTCCCAAAAGTTCAAGGGAAGGGTCAC |
| | | AATCACGGCCGACAAGAGCGCCTCAACTGCCTA |
| | | CATGGAGCTGAGCAGCCTCAGATCCGAAGATAC |
| | | CGCGGTGTACTACTGCGCCCGGAGCTTCTTCTAC |
| | | GGTTCGTCTGATTGGTACTTTGACGTCTGGGGCC |
| | | AGGGAACCACCGTGACCGTGTCGTCCGGTGGCG |
| | | GAGGGAGCGGTGGAGGAGGCTCCGGGGGAGGA |
| | | GGCAGCGGCGGGGGAGGCAGCGACATCCAGCTT |
| | | ACCCAGTCGCCATCATTCCTGTCCGCATCAGTGG |
| | | GTGATCGCGTGACCATTACCTGTCGGGCGTCCTC |
| | | CTCCGTGAACAACATGCACTGGTACCAGCAGAA |
| | | GCCGGGGAAGGCTCCCAAGCCTCTGATCTACGC |
| | | CACTAGCAATTTGGCCAGCGGCGTGCCTTCGAGA |
| | | TTCTCGGGGTCGGGCTCAGGAACCGAGTATACCC |
| | | TGACCATTTCCTCCCTCCAACCGGAGGACTTTGC |
| | | TACTTACTACTGCCAGCAGTGGATTTTCAACCCC |
| | | CCGACTTTCGGACAGGGCACCAAGCTGGAAATC |
| | | AAGACCACTACCCCAGCACCGAGGCCACCCACC |
| | | CCGGCTCCTACCATCGCCTCCCAGCCTCTGTCCC |
| | | TGCGTCCGGAGGCATGTAGACCCGCAGCTGGTG |
| | | GGGCCGTGCATACCCGGGGTCTTGACTTCGCCTG |
| | | CGATATCTACATTTGGGCCCCTCTGGCTGGTACT |
| | | TGCGGGGTCCTGCTGCTTTCACTCGTGATCACTC |
| | | TTTACTGTAAGCGCGGTCGGAAGAAGCTGCTGTA |
| | | CATCTTTAAGCAACCCTTCATGAGGCCTGTGCAG |
| | | ACTACTCAAGAGGAGGACGGCTGTTCATGCCGG |
| | | TTCCCAGAGGAGGAGGAAGGCGGCTGCGAACTG |
| | | CGCGTGAAATTCAGCCGCAGCGCAGATGCTCCA |
| | | GCCTACCAGCAGGGGCAGAACCAGCTCTACAAC |
| | | GAACTCAATCTTGGTCGGAGAGAGGAGTACGAC |
| | | GTGCTGGACAAGCGGAGAGGACGGGACCCAGAA |
| | | ATGGGCGGGAAGCCGCGCAGAAAGAATCCCCAA |
| | | GAGGGCCTGTACAACGAGCTCCAAAAGGATAAG |
| | | ATGGCAGAAGCCTATAGCGAGATTGGTATGAAA |
| | | GGGGAACGCAGAAGAGGCAAAGGCCACGACGG |
| | | ACTGTACCAGGGACTCAGCACCGCCACCAAGGA |
| | | CACCTATGACGCTCTTCACATGCAGGCCCTGCCG |
| | | CCTCGG |
| CD20-C8H3 | | |
| SEQ ID NO: | HCDR1 | RYNMH |
| 2145 (Kabat) | | |
| SEQ ID NO: | HCDR2 | AIYPGNGDTSYSQKFKG |
| 2146 (Kabat) | | |
| SEQ ID NO: | HCDR3 | SFFYGSSDWYFDV |
| 2147 (Kabat) | | |
| SEQ ID NO: | HCDR1 | GYTFTRY |
| 2148 (Chothia) | | |
| SEQ ID NO: | HCDR2 | YPGNGD |
| 2047 (Chothia) | | |
| SEQ ID NO: | HCDR3 | SFFYGSSDWYFDV |
| 2147 (Chothia) | | |
| SEQ ID NO: | HCDR1 | GYTFTRYN |
| 2149 (IMGT) | | |
| SEQ ID NO: | HCDR2 | IYPGNGDT |
| 2049 (IMGT) | | |
| SEQ ID NO: | HCDR3 | ARSFFYGSSDWYFDV |
| 2150 (IMGT) | | |
| SEQ ID NO: | HCDR1 | GYTFTRYNMH |
| 2151 (Combined | | |
| Chothia and | | |
| Kabat) | | |
| SEQ ID NO: | HCDR2 | AIYPGNGDTSYSQKFKG |
| 2146 (Combined | | |
| Chothia and | | |
| Kabat) | | |
| SEQ ID NO: | HCDR3 | SFFYGSSDWYFDV |
| 2147 (Combined | | |
| Chothia and | | |
| Kabat) | | |
| SEQ ID NO: | VH | QVQLVQSGAEVKKPGSSVKVSCKASGYTFTRYNM |
| 2170 | | HWVRQAPGQGLEWMGAIYPGNGDTSYSQKFKGR |
| | | VTITADKSTSTAYMELSSLRSEDTAVYYCARSFFY |
| | | GSSDWYFDVWGQGTTVTVSS |
| SEQ ID NO: | DNA VH | CAAGTGCAACTCGTCCAGTCCGGTGCAGAAGTC |
| 2171 | | AAGAAGCCTGGTTCCTCCGTGAAAGTGTCCTGCA |
| | | AAGCGTCTGGCTACACCTTCACCCGGTACAATAT |
| | | GCACTGGGTCAGACAGGCGCCCGGACAGGGCCT |
| | | GGAGTGGATGGGGGCCATCTACCCTGGGAACGG |
| | | CGACACTAGCTACTCCCAAAAGTTCAAGGGCCG |
| | | CGTGACGATTACCGCCGACAAGTCAACCAGCAC |
| | | TGCCTATATGGAGCTGAGCTCGCTTCGGAGCGAA |
| | | GATACCGCCGTGTACTACTGCGCTCGGAGCTTCT |
| | | TCTACGGGTCCTCGGATTGGTACTTCGACGTCTG |
| | | GGGCCAGGGGACTACTGTGACCGTGTCCTCC |
| SEQ ID NO: | LCDR1 | RASSSVNNMH |
| 2154 (Kabat) | | |
| SEQ ID NO: | LCDR2 | ATSNLAS |
| 2031 (Kabat) | | |
| SEQ ID NO: | LCDR3 | QQWIFNPPT |
| 2055 (Kabat) | | |
| SEQ ID NO: | LCDR1 | SSSVNN |
| 2155 (Chothia) | | |
| SEQ ID NO: | LCDR2 | ATS |
| 2034 (Chothia) | | |
| SEQ ID NO: | LCDR3 | WIFNPP |
| 2057 (Chothia) | | |
| SEQ ID NO: | LCDR1 | SSVNN |
| 2156 (IMGT) | | |
| SEQ ID NO: | LCDR2 | ATS |
| 2034 (IMGT) | | |
| SEQ ID NO: | LCDR3 | QQWIFNPPT |
| 2055 (IMGT) | | |
| SEQ ID NO: | LCDR1 | RASSSVNNMH |
| 2154 (Combined | | |
| Chothia and | | |
| Kabat) | | |
| SEQ ID NO: | LCDR2 | ATSNLAS |
| 2031 (Combined | | |
| Chothia and | | |
| Kabat) | | |
| SEQ ID NO: | LCDR3 | QQWIFNPPT |
| 2055 (Combined | | |
| Chothia and | | |
| Kabat) | | |
| SEQ ID NO: | VL | EIVLTQSPDFQSVTPKEKVTITCRASSSVNNMHWY |
| 2157 | | QQKPDQSPKPLIYATSNLASGVPSRFSGSGSGTDYT |
| | | LTINSLEAEDAATYYCQQWWNPPTFGQGTKLEIK |
| SEQ ID NO: | DNA VL | GAAATCGTGCTGACCCAGTCCCCGGACTTTCAGT |
| 2172 | | CAGTGACTCCCAAGGAGAAGGTCACCATTACTT |
| | | GTCGCGCCTCCTCCTCGGTGAACAACATGCACTG |
| | | GTACCAGCAGAAGCCGGACCAGTCCCCGAAGCC |
| | | CCTGATCTATGCTACCTCCAACTTGGCGTCCGGC |
| | | GTGCCGTCAAGGTTCAGCGGATCGGGTTCCGGG |
| | | ACAGACTACACCCTGACTATTAACTCACTCGAGG |
| | | CCGAGGATGCCGCCACCTACTACTGCCAGCAGT |
| | | GGATCTTCAACCCTCCAACCTTCGGACAAGGAAC |
| | | CAAGCTGGAAATCAAG |
| SEQ ID NO: | Linker | GGGGSGGGGSGGGGSGGGGS |
| 1010 | | |
| SEQ ID NO: | scFv (VH- | QVQLVQSGAEVKKPGSSVKVSCKASGYTFTRYNM |
| 2173 | linker-VL) | HWVRQAPGQGLEWMGAIYPGNGDTSYSQKFKGR |
| | | VTITADKSTSTAYMELSSLRSEDTAVYYCARSFFY |
| | | GSSDWYFDVWGQGTTVTVSSGGGGSGGGGSGGG |
| | | GSGGGGSEIVLTQSPDFQSVTPKEKVTITCRASSSV |
| | | NNMHWYQQKPDQSPKPLIYATSNLASGVPSRFSGS |
| | | GSGTDYTLTINSLEAEDAATYYCQQWIFNPPTFGQ |
| | | GTKLEIK |
| SEQ ID NO: | DNA scFv | CAAGTGCAACTCGTCCAGTCCGGTGCAGAAGTCAAG |
| 2174 | (VH-linker- | AAGCCTGGTTCCTCCGTGAAAGTGTCCTGCAAAGCGT |
| | VL) | CTGGCTACACCTTCACCCGGTACAATATGCACTGGGT |
| | | CAGACAGGCGCCCGGACAGGGCCTGGAGTGGATGGG |
| | | GGCCATCTACCCTGGGAACGGCGACACTAGCTACTCC |
| | | CAAAAGTTCAAGGGCCGCGTGACGATTACCGCCGAC |
| | | AAGTCAACCAGCACTGCCTATATGGAGCTGAGCTCGC |
| | | TTCGGAGCGAAGATACCGCCGTGTACTACTGCGCTCG |
| | | GAGCTTCTTCTACGGGTCCTCGGATTGGTACTTCGAC |
| | | GTCTGGGGCCAGGGGACTACTGTGACCGTGTCCTCCG |
| | | GGGGAGGAGGATCGGGCGGAGGCGGTTCGGGAGGC |
| | | GGCGGAAGCGGAGGCGGAGGTTCAGAAATCGTGCTG |
| | | ACCCAGTCCCCGGACTTTCAGTCAGTGACTCCCAAGG |
| | | AGAAGGTCACCATTACTTGTCGCGCCTCCTCCTCGGT |
| | | GAACAACATGCACTGGTACCAGCAGAAGCCGGACCA |
| | | GTCCCCGAAGCCCCTGATCTATGCTACCTCCAACTTG |
| | | GCGTCCGGCGTGCCGTCAAGGTTCAGCGGATCGGGTT |
| | | CCGGGACAGACTACACCCTGACTATTAACTCACTCGA |
| | | GGCCGAGGATGCCGCCACCTACTACTGCCAGCAGTG |
| | | GATCTTCAACCCTCCAACCTTCGGACAAGGAACCAAG |
| | | CTGGAAATCAAG |
| SEQ ID NO: | Full CAR | MALPVTALLLPLALLLHAARPQVQLVQSGAEVKK |
| 2175 | amino acid | PGSSVKVSCKASGYTFTRYNMHWVRQAPGQGLE |
| | sequence | WMGAIYPGNGDTSYSQKFKGRVTITADKSTSTAY |
| | | MELSSLRSEDTAVYYCARSFFYGSSDWYFDVWGQ |
| | | GTTVTVSSGGGGSGGGGSGGGGSGGGGSEIVLTQS |
| | | PDFQSVTPKEKVTITCRASSSVNNMHWYQQKPDQS |
| | | PKPLIYATSNLASGVPSRFSGSGSGTDYTLTINSLEA |
| | | EDAATYYCQQWIFNPPTFGQGTKLEIKTTTPAPRPP |
| | | TPAPTIASQPLSLRPEACRPAAGGAVHTRGLDFACD |
| | | IYIWAPLAGTCGVLLLSLVITLYCKRGRKKLLYIFK |
| | | QPFMRPVQTTQEEDGCSCRFPEEEEGGCELRVKFS |
| | | RSADAPAYQQGQNQLYNELNLGRREEYDVLDKRR |
| | | GRDPEMGGKPRRKNPQEGLYNELQKDKMAEAYS |
| | | EIGMKGERRRGKGHDGLYQGLSTATKDTYDALH |
| | | MQALPPR |
| SEQ ID NO: | Full CAR | ATGGCCCTCCCTGTCACCGCCCTGCTGCTTCCGC |
| 2176 | nucleic acid | TGGCTCTTCTGCTCCACGCCGCTCGGCCCCAAGT |
| | sequence | GCAACTCGTCCAGTCCGGTGCAGAAGTCAAGAA |
| | | GCCTGGTTCCTCCGTGAAAGTGTCCTGCAAAGCG |
| | | TCTGGCTACACCTTCACCCGGTACAATATGCACT |
| | | GGGTCAGACAGGCGCCCGGACAGGGCCTGGAGT |
| | | GGATGGGGGCCATCTACCCTGGGAACGGCGACA |
| | | CTAGCTACTCCCAAAAGTTCAAGGGCCGCGTGA |
| | | CGATTACCGCCGACAAGTCAACCAGCACTGCCT |
| | | ATATGGAGCTGAGCTCGCTTCGGAGCGAAGATA |
| | | CCGCCGTGTACTACTGCGCTCGGAGCTTCTTCTA |
| | | CGGGTCCTCGGATTGGTACTTCGACGTCTGGGGC |
| | | CAGGGGACTACTGTGACCGTGTCCTCCGGGGGA |
| | | GGAGGATCGGGCGGAGGCGGTTCGGGAGGCGGC |
| | | GGAAGCGGAGGCGGAGGTTCAGAAATCGTGCTG |
| | | ACCCAGTCCCCGGACTTTCAGTCAGTGACTCCCA |
| | | AGGAGAAGGTCACCATTACTTGTCGCGCCTCCTC |
| | | CTCGGTGAACAACATGCACTGGTACCAGCAGAA |
| | | GCCGGACCAGTCCCCGAAGCCCCTGATCTATGCT |
| | | ACCTCCAACTTGGCGTCCGGCGTGCCGTCAAGGT |
| | | TCAGCGGATCGGGTTCCGGGACAGACTACACCC |
| | | TGACTATTAACTCACTCGAGGCCGAGGATGCCGC |
| | | CACCTACTACTGCCAGCAGTGGATCTTCAACCCT |
| | | CCAACCTTCGGACAAGGAACCAAGCTGGAAATC |
| | | AAGACCACTACCCCAGCACCGAGGCCACCCACC |
| | | CCGGCTCCTACCATCGCCTCCCAGCCTCTGTCCC |
| | | TGCGTCCGGAGGCATGTAGACCCGCAGCTGGTG |
| | | GGGCCGTGCATACCCGGGGTCTTGACTTCGCCTG |
| | | CGATATCTACATTTGGGCCCCTCTGGCTGGTACT |
| | | TGCGGGGTCCTGCTGCTTTCACTCGTGATCACTC |
| | | TTTACTGTAAGCGCGGTCGGAAGAAGCTGCTGTA |
| | | CATCTTTAAGCAACCCTTCATGAGGCCTGTGCAG |
| | | ACTACTCAAGAGGAGGACGGCTGTTCATGCCGG |
| | | TTCCCAGAGGAGGAGGAAGGCGGCTGCGAACTG |
| | | CGCGTGAAATTCAGCCGCAGCGCAGATGCTCCA |
| | | GCCTACCAGCAGGGGCAGAACCAGCTCTACAAC |
| | | GAACTCAATCTTGGTCGGAGAGAGGAGTACGAC |
| | | GTGCTGGACAAGCGGAGAGGACGGGACCCAGAA |
| | | ATGGGCGGGAAGCCGCGCAGAAAGAATCCCCAA |
| | | GAGGGCCTGTACAACGAGCTCCAAAAGGATAAG |
| | | ATGGCAGAAGCCTATAGCGAGATTGGTATGAAA |
| | | GGGGAACGCAGAAGAGGCAAAGGCCACGACGG |
| | | ACTGTACCAGGGACTCAGCACCGCCACCAAGGA |
| | | CACCTATGACGCTCTTCACATGCAGGCCCTGCCG |
| | | CCTCGG |
| CD20-C8H4 | | |
| SEQ ID NO: | HCDR1 | RYNMH |
| 2145 (Kabat) | | |
| SEQ ID NO: | HCDR2 | AIYPGNGDTSYSQKFKG |
| 2146 (Kabat) | | |
| SEQ ID NO: | HCDR3 | SFFYGSSDWYFDV |
| 2147 (Kabat) | | |
| SEQ ID NO: | HCDR1 | GYTFTRY |
| 2148 (Chothia) | | |
| SEQ ID NO: | HCDR2 | YPGNGD |
| 2047 (Chothia) | | |
| SEQ ID NO: | HCDR3 | SFFYGSSDWYFDV |
| 2147 (Chothia) | | |
| SEQ ID NO: | HCDR1 | GYTFTRYN |
| 2149 (IMGT) | | |
| SEQ ID NO: | HCDR2 | IYPGNGDT |
| 2049 (IMGT) | | |
| SEQ ID NO: | HCDR3 | ARSFFYGSSDWYFDV |
| 2150 (IMGT) | | |
| SEQ ID NO: | HCDR1 | GYTFTRYNMH |
| 2151 (Combined | | |
| Chothia and | | |
| Kabat) | | |
| SEQ ID NO: | HCDR2 | AIYPGNGDTSYSQKFKG |
| 2146 (Combined | | |
| Chothia and | | |
| Kabat) | | |
| SEQ ID NO: | HCDR3 | SFFYGSSDWYFDV |
| 2147 (Combined | | |
| Chothia and | | |
| Kabat) | | |
| SEQ ID NO: | VH | QVQLVQSGAEVKKPGSSVKVSCKASGYTFTRYNM |
| 2170 | | HWVRQAPGQGLEWMGAIYPGNGDTSYSQKFKGR |
| | | VTITADKSTSTAYMELSSLRSEDTAVYYCARSFFY |
| | | GSSDWYFDVWGQGTTVTVSS |
| SEQ ID NO: | DNA VH | CAAGTCCAACTCGTCCAGTCTGGCGCAGAAGTC |
| 2177 | | AAGAAGCCCGGAAGCTCCGTGAAAGTGTCCTGC |
| | | AAAGCGTCGGGTTACACTTTCACCCGGTACAACA |
| | | TGCACTGGGTCAGACAGGCCCCTGGACAAGGAC |
| | | TGGAGTGGATGGGTGCCATCTACCCTGGAAACG |
| | | GAGATACCTCCTACTCCCAAAAGTTCAAGGGGA |
| | | GAGTGACCATTACCGCCGACAAGTCAACTTCCAC |
| | | CGCTTACATGGAGCTCAGCTCCCTGCGGTCCGAA |
| | | GATACTGCGGTGTACTATTGCGCTCGCTCATTTT |
| | | TCTACGGCTCATCGGATTGGTACTTCGACGTCTG |
| | | GGGACAGGGAACTACCGTGACCGTGTCCTCG |
| SEQ ID NO: | LCDR1 | RASSSVNNMH |
| 2154 (Kabat) | | |
| SEQ ID NO: | LCDR2 | ATSNLAS |
| 2031 (Kabat) | | |
| SEQ ID NO: | LCDR3 | QQWIFNPPT |
| 2055 (Kabat) | | |
| SEQ ID NO: | LCDR1 | SSSVNN |
| 2155 (Chothia) | | |
| SEQ ID NO: | LCDR2 | ATS |
| 2034 (Chothia) | | |
| SEQ ID NO: | LCDR3 | WIFNPP |
| 2057 (Chothia) | | |
| SEQ ID NO: | LCDR1 | SSVNN |
| 2156 (IMGT) | | |
| SEQ ID NO: | LCDR2 | ATS |
| 2034 (IMGT) | | |
| SEQ ID NO: | LCDR3 | QQWIFNPPT |
| 2055 (IMGT) | | |
| SEQ ID NO: | LCDR1 | RASSSVNNMH |
| 2154 (Combined | | |
| Chothia and | | |
| Kabat) | | |
| SEQ ID NO: | LCDR2 | ATSNLAS |
| 2031 (Combined | | |
| Chothia and | | |
| Kabat) | | |
| SEQ ID NO: | LCDR3 | QQWIFNPPT |
| 2055 (Combined | | |
| Chothia and | | |
| Kabat) | | |
| SEQ ID NO: | VL | DIQLTQSPSFLSASVGDRVTITCRASSSVNNMHWY |
| 2164 | | QQKPGKAPKPLIYATSNLASGVPSRFSGSGSGTEYT |
| | | LTISSLQPEDFATYYCQQWIFNPPTFGQGTKLEIK |
| SEQ ID NO: | DNA VL | GACATCCAGCTGACTCAGTCCCCGTCCTTCCTGT |
| 2178 | | CCGCCTCCGTGGGGGACCGCGTGACGATTACTTG |
| | | TCGGGCCTCCTCATCCGTGAACAACATGCATTGG |
| | | TACCAGCAGAAGCCAGGAAAGGCACCGAAGCCG |
| | | CTTATCTATGCCACCTCGAATCTGGCCAGCGGAG |
| | | TGCCTTCGAGGTTTAGCGGCTCCGGCTCCGGCAC |
| | | CGAGTACACTTTGACCATTAGCAGCCTCCAGCCG |
| | | GAGGACTTCGCCACATACTACTGCCAGCAGTGG |
| | | ATCTTCAACCCCCCCACCTTCGGCCAAGGAACCA |
| | | AGCTGGAAATCAAG |
| SEQ ID NO: | Linker | GGGGSGGGGSGGGGSGGGGS |
| 1010 | | |
| SEQ ID NO: | scFv (VH- | QVQLVQSGAEVKKPGSSVKVSCKASGYTFTRYNM |
| 2179 | linker-VL) | HWVRQAPGQGLEWMGAIYPGNGDTSYSQKFKGR |
| | | VTITADKSTSTAYMELSSLRSEDTAVYYCARSFFY |
| | | GSSDWYFDVWGQGTTVTVSSGGGGSGGGGSGGG |
| | | GSGGGGSDIQLTQSPSFLSASVGDRVTITCRASSSV |
| | | NNMHWYQQKPGKAPKPLIYATSNLASGVPSRFSGS |
| | | GSGTEYTLTISSLQPEDFATYYCQQWIFNPPTFGQG |
| | | TKLEIK |
| SEQ ID NO: | DNA scFv | CAAGTCCAACTCGTCCAGTCTGGCGCAGAAGTC |
| 2180 | (VH-linker- | AAGAAGCCCGGAAGCTCCGTGAAAGTGTCCTGC |
| | VL) | AAAGCGTCGGGTTACACTTTCACCCGGTACAACA |
| | | TGCACTGGGTCAGACAGGCCCCTGGACAAGGAC |
| | | TGGAGTGGATGGGTGCCATCTACCCTGGAAACG |
| | | GAGATACCTCCTACTCCCAAAAGTTCAAGGGGA |
| | | GAGTGACCATTACCGCCGACAAGTCAACTTCCAC |
| | | CGCTTACATGGAGCTCAGCTCCCTGCGGTCCGAA |
| | | GATACTGCGGTGTACTATTGCGCTCGCTCATTTT |
| | | TCTACGGCTCATCGGATTGGTACTTCGACGTCTG |
| | | GGGACAGGGAACTACCGTGACCGTGTCCTCGGG |
| | | GGGAGGAGGATCGGGCGGAGGCGGTTCGGGAGGCG |
| | | GCGGAAGCGGAGGCGGAGGTTCAGACATCCAGCTG |
| | | ACTCAGTCCCCGTCCTTCCTGTCCGCCTCCGTGG |
| | | GGGACCGCGTGACGATTACTTGTCGGGCCTCCTC |
| | | ATCCGTGAACAACATGCATTGGTACCAGCAGAA |
| | | GCCAGGAAAGGCACCGAAGCCGCTTATCTATGC |
| | | CACCTCGAATCTGGCCAGCGGAGTGCCTTCGAG |
| | | GTTTAGCGGCTCCGGCTCCGGCACCGAGTACACT |
| | | TTGACCATTAGCAGCCTCCAGCCGGAGGACTTCG |
| | | CCACATACTACTGCCAGCAGTGGATCTTCAACCC |
| | | CCCCACCTTCGGCCAAGGAACCAAGCTGGAAAT |
| | | CAAG |
| SEQ ID NO: | Full CAR | MALPVTALLLPLALLLHAARPQVQLVQSGAEVKK |
| 2181 | amino acid | PGSSVKVSCKASGYTFTRYNMHWVRQAPGQGLE |
| | sequence | WMGAIYPGNGDTSYSQKFKGRVTITADKSTSTAY |
| | | MELSSLRSEDTAVYYCARSFFYGSSDWYFDVWGQ |
| | | GTTVTVSSGGGGSGGGGSGGGGSGGGGSDIQLTQS |
| | | PSFLSASVGDRVTITCRASSSVNNMHWYQQKPGK |
| | | APKPLIYATSNLASGVPSRFSGSGSGTEYTLTISSLQ |
| | | PEDFATYYCQQWIFNPPTFGQGTKLEIKTTTPAPRP |
| | | PTPAPTIASQPLSLRPEACRPAAGGAVHTRGLDFAC |
| | | DIYIWAPLAGTCGVLLLSLVITLYCKRGRKKLLYIF |
| | | KQPFMRPVQTTQEEDGCSCRFPEEEEGGCELRVKF |
| | | SRSADAPAYQQGQNQLYNELNLGRREEYDVLDKR |
| | | RGRDPEMGGKPRRKNPQEGLYNELQKDKMAEAY |
| | | SEIGMKGERRRGKGHDGLYQGLSTATKDTYDALH |
| | | MQALPPR |
| SEQ ID NO: | Full CAR | ATGGCCCTCCCTGTCACCGCCCTGCTGCTTCCGC |
| 2182 | nucleic acid | TGGCTCTTCTGCTCCACGCCGCTCGGCCCCAAGT |
| | sequence | CCAACTCGTCCAGTCTGGCGCAGAAGTCAAGAA |
| | | GCCCGGAAGCTCCGTGAAAGTGTCCTGCAAAGC |
| | | GTCGGGTTACACTTTCACCCGGTACAACATGCAC |
| | | TGGGTCAGACAGGCCCCTGGACAAGGACTGGAG |
| | | TGGATGGGTGCCATCTACCCTGGAAACGGAGAT |
| | | ACCTCCTACTCCCAAAAGTTCAAGGGGAGAGTG |
| | | ACCATTACCGCCGACAAGTCAACTTCCACCGCTT |
| | | ACATGGAGCTCAGCTCCCTGCGGTCCGAAGATA |
| | | CTGCGGTGTACTATTGCGCTCGCTCATTTTTCTAC |
| | | GGCTCATCGGATTGGTACTTCGACGTCTGGGGAC |
| | | AGGGAACTACCGTGACCGTGTCCTCGGGGGGAG |
| | | GGGGGAGCGGCGGAGGGGGCTCGGGCGGTGGA |
| | | GGAAGCGGAGGCGGCGGTTCGGACATCCAGCTG |
| | | ACTCAGTCCCCGTCCTTCCTGTCCGCCTCCGTGG |
| | | GGGACCGCGTGACGATTACTTGTCGGGCCTCCTC |
| | | ATCCGTGAACAACATGCATTGGTACCAGCAGAA |
| | | GCCAGGAAAGGCACCGAAGCCGCTTATCTATGC |
| | | CACCTCGAATCTGGCCAGCGGAGTGCCTTCGAG |
| | | GTTTAGCGGCTCCGGCTCCGGCACCGAGTACACT |
| | | TTGACCATTAGCAGCCTCCAGCCGGAGGACTTCG |
| | | CCACATACTACTGCCAGCAGTGGATCTTCAACCC |
| | | CCCCACCTTCGGCCAAGGAACCAAGCTGGAAAT |
| | | CAAGACCACTACCCCAGCACCGAGGCCACCCAC |
| | | CCCGGCTCCTACCATCGCCTCCCAGCCTCTGTCC |
| | | CTGCGTCCGGAGGCATGTAGACCCGCAGCTGGT |
| | | GGGGCCGTGCATACCCGGGGTCTTGACTTCGCCT |
| | | GCGATATCTACATTTGGGCCCCTCTGGCTGGTAC |
| | | TTGCGGGGTCCTGCTGCTTTCACTCGTGATCACT |
| | | CTTTACTGTAAGCGCGGTCGGAAGAAGCTGCTGT |
| | | ACATCTTTAAGCAACCCTTCATGAGGCCTGTGCA |
| | | GACTACTCAAGAGGAGGACGGCTGTTCATGCCG |
| | | GTTCCCAGAGGAGGAGGAAGGCGGCTGCGAACT |
| | | GCGCGTGAAATTCAGCCGCAGCGCAGATGCTCC |
| | | AGCCTACCAGCAGGGGCAGAACCAGCTCTACAA |
| | | CGAACTCAATCTTGGTCGGAGAGAGGAGTACGA |
| | | CGTGCTGGACAAGCGGAGAGGACGGGACCCAGA |
| | | AATGGGCGGGAAGCCGCGCAGAAAGAATCCCCA |
| | | AGAGGGCCTGTACAACGAGCTCCAAAAGGATAA |
| | | GATGGCAGAAGCCTATAGCGAGATTGGTATGAA |
| | | AGGGGAACGCAGAAGAGGCAAAGGCCACGACG |
| | | GACTGTACCAGGGACTCAGCACCGCCACCAAGG |
| | | ACACCTATGACGCTCTTCACATGCAGGCCCTGCC |
| | | GCCTCGG |
| CD20-C2 | | |
| SEQ ID NO: | VH | QVHLQQSGAELAKPGASVKMSCKASGYTFTNYW |
| 2183 | | MHWVKQRPGQGLEWIGFITPTTGYPEYNQKFKDK |
| | | ATLTADKSSSTAYMQLSSLTSEDSAVYYCARRKVG |
| | | KGVYYALDYWGQGTSVTVSS |
| SEQ ID NO: | DNA VH | CAAGTGCATCTGCAGCAGTCGGGGGCCGAACTG |
| 2184 | | GCAAAGCCAGGCGCCAGCGTGAAGATGAGCTGC |
| | | AAGGCCTCCGGGTACACCTTCACCAACTACTGGA |
| | | TGCACTGGGTCAAGCAGCGCCCGGGCCAGGGAC |
| | | TCGAGTGGATCGGGTTCATCACGCCGACTACCGG |
| | | CTACCCGGAGTATAACCAGAAGTTCAAGGACAA |
| | | GGCCACTCTGACTGCCGACAAGTCCTCGTCTACC |
| | | GCGTACATGCAACTGTCCTCACTGACTTCGGAGG |
| | | ATTCCGCTGTGTACTACTGCGCGCGGAGGAAAGT |
| | | CGGAAAGGGAGTGTACTATGCCCTGGACTACTG |
| | | GGGCCAGGGTACCAGCGTCACTGTGTCCTCC |
| SEQ ID NO: | VL | DILMTQSPASLSASVGETVTITCRASGNIHNYLAWY |
| 2185 | | QQKQGNSPQLLVYNTKTLADGVPSRFSGSGSGTQY |
| | | SLKINSLQTEDFGTYYCQHFWSSPWTFGGGTKLEI |
| | | K |
| SEQ ID NO: | DNA VL | GACATTCTGATGACCCAGTCCCCTGCATCACTCT |
| 2186 | | CCGCGTCCGTGGGAGAAACCGTGACCATCACGT |
| | | GTAGAGCCTCCGGCAACATCCACAACTACCTGG |
| | | CCTGGTACCAGCAGAAGCAGGGAAACTCGCCCC |
| | | AACTGCTTGTGTACAACACCAAGACCTTGGCTGA |
| | | CGGAGTGCCTTCCCGGTTCTCGGGTTCGGGATCA |
| | | GGCACACAGTACTCCCTGAAAATCAATAGCCTCC |
| | | AGACCGAAGATTTTGGAACCTACTACTGCCAAC |
| | | ACTTCTGGAGCTCCCCCTGGACTTTCGGAGGCGG |
| | | TACCAAGCTCGAGATTAAG |
| CD20-C3 | | |
| SEQ ID NO: | VH | QVQLQQPGAELVKPGASVKMSCKASGYTFTNYNL |
| 2187 | | HWVKQTPGQGLEWIGAIYPGNYDTSYNQKFKGKA |
| | | TLTADKSSSTAYMLLSSLTSEDSAVYFCARVDFGH |
| | | SRYWYFDVWGAGTTVTVSS |
| SEQ ID NO: | DNA VH | CAAGTGCAGCTGCAGCAGCCTGGTGCCGAGCTC |
| 2188 | | GTGAAGCCGGGAGCGTCCGTGAAGATGAGCTGC |
| | | AAAGCCTCGGGCTACACCTTCACCAATTACAACT |
| | | TGCATTGGGTCAAGCAGACCCCGGGCCAGGGCC |
| | | TCGAATGGATCGGAGCGATCTACCCCGGGAACT |
| | | ACGATACTAGCTACAACCAGAAGTTCAAGGGAA |
| | | AGGCCACCCTGACCGCCGATAAGTCCTCATCCAC |
| | | CGCCTACATGCTGCTGTCCTCGCTGACTTCCGAG |
| | | GACTCCGCTGTGTACTTCTGCGCCCGCGTGGACT |
| | | TCGGACACAGCAGATATTGGTATTTTGACGTCTG |
| | | GGGCGCCGGGACTACCGTGACTGTGTCGTCC |
| SEQ ID NO: | VL | QIVLSQSPAILSASPGEKVTMTCRATSSVSSMNWY |
| 2189 | | QQKPGSFPRPWIHATSNLASGVPARFSGSGSGTSYS |
| | | LTISRVEAEDAATYYCQQWTFNPPTFGAGAKLELK |
| SEQ ID NO: | DNA VL | CAAATTGTCCTGAGCCAGAGCCCGGCTATCCTGT |
| 2190 | | CCGCCTCACCGGGCGAAAAGGTCACCATGACTT |
| | | GTCGGGCCACTTCCTCCGTGTCATCCATGAACTG |
| | | GTACCAGCAGAAGCCTGGCAGCTTCCCTCGGCC |
| | | ATGGATTCACGCCACGTCAAACCTGGCATCGGG |
| | | AGTGCCCGCAAGGTTCTCCGGGTCCGGCAGCGG |
| | | AACATCCTACTCCCTCACCATCTCGCGCGTGGAA |
| | | GCGGAGGACGCTGCCACCTACTACTGCCAACAG |
| | | TGGACCTTCAACCCCCCCACCTTTGGAGCGGGAG |
| | | CCAAGCTGGAACTTAAG |
| CD20-C5 | | |
| SEQ ID NO: | VH | QVQLQQPGAELVKPGASVKMSCKASGYTFTSYNM |
| 2191 | | HWVKQTPGQGLEWIGAIYPGNGDTSYNPKFKGKA |
| | | TLTADKSSRTAYIHLSSLTSEDSVVYYCARSYFYGS |
| | | SSWYFDVWGAGTTVTVSS |
| SEQ ID NO: | DNA VH | CAAGTGCAGCTGCAGCAGCCGGGAGCAGAGCTC |
| 2192 | | GTGAAGCCTGGAGCCTCAGTGAAGATGAGCTGC |
| | | AAGGCCTCCGGTTACACCTTCACCTCCTACAACA |
| | | TGCACTGGGTCAAGCAGACCCCCGGACAAGGCC |
| | | TGGAATGGATCGGCGCCATCTACCCGGGAAACG |
| | | GGGACACCTCCTATAACCCCAAGTTCAAGGGAA |
| | | AAGCAACCCTGACCGCGGACAAGTCCAGCAGAA |
| | | CTGCCTACATCCATCTTTCCTCGCTGACGTCCGA |
| | | GGATTCCGTGGTGTACTACTGTGCCCGCTCCTAC |
| | | TTCTACGGGTCATCCTCGTGGTACTTCGATGTCT |
| | | GGGGCGCTGGAACCACCGTGACTGTGTCCTCC |
| SEQ ID NO: | VL | QIILSQSPAILSASPGEKVTLTCRASSSVSSMHWYQ |
| 2193 | | QKPGSSPKPWIFATSNLASGVPARFTGSGSGTSYSL |
| | | TISRVEAEDAATYYCQQWIFNPPTFGGGTSLEIK |
| SEQ ID NO: | DNA VL | CAGATCATTCTGAGCCAGAGCCCGGCCATTCTGT |
| 2194 | | CTGCCTCGCCTGGAGAAAAAGTCACCCTCACTTG |
| | | CCGGGCCAGCTCCTCCGTGTCCTCAATGCACTGG |
| | | TACCAGCAGAAGCCTGGCTCAAGCCCGAAGCCC |
| | | TGGATCTTCGCCACCTCCAATCTGGCGTCAGGAG |
| | | TGCCCGCGAGGTTCACTGGATCGGGGTCCGGCA |
| | | CATCGTATTCGCTCACCATTTCCCGGGTGGAGGC |
| | | CGAGGACGCCGCTACTTACTACTGCCAACAGTG |
| | | GATCTTCAACCCACCGACCTTTGGCGGAGGGACT |
| | | TCCTTGGAAATCAAG |
| CD20-C6 | | |
| SEQ ID NO: | VH | QIQLVQSGPELKKPGETVKISCKTSGYTFTSHGINW |
| 2195 | | VKQAPRKGLKWMGWINTYTGEPTYGDDFKGRFA |
| | | FSLETSARTAYLQINNLKNEDTATYFCARYGNYEE |
| | | PYAMDYWGQGTSVTVSS |
| SEQ ID NO: | DNA VH | CAAATTCAGCTGGTGCAGTCGGGACCTGAGCTC |
| 2196 | | AAGAAGCCCGGAGAAACCGTGAAGATCTCCTGC |
| | | AAGACTTCCGGGTACACTTTTACTTCCCACGGCA |
| | | TCAACTGGGTCAAGCAGGCACCAAGGAAGGGGC |
| | | TTAAGTGGATGGGCTGGATTAACACCTACACCG |
| | | GCGAACCCACCTATGGCGATGACTTCAAAGGAC |
| | | GGTTCGCGTTCTCCCTCGAAACCTCAGCAAGAAC |
| | | CGCGTATTTGCAAATCAACAACCTGAAGAACGA |
| | | GGACACCGCCACCTACTTCTGCGCCCGCTACGGA |
| | | AATTACGAGGAACCTTACGCTATGGACTACTGG |
| | | GGCCAGGGCACTTCCGTGACTGTGTCGTCC |
| SEQ ID NO: | VL | QIVLSQSPAILSASPGEKVTMTCRATSSVSSMNWY |
| 2189 | | QQKPGSFPRPWIHATSNLASGVPARFSGSGSGTSYS |
| | | LTISRVEAEDAATYYCQQWTFNPPTFGAGAKLELK |
| SEQ ID NO: | DNA VL | CAGATCGTGCTGAGCCAGAGCCCCGCCATCCTG |
| 2197 | | AGCGCTTCCCCGGGAGAAAAGGTCACCATGACT |
| | | TGCCGGGCCACTAGCAGCGTGTCCTCCATGAACT |
| | | GGTACCAGCAGAAGCCGGGCTCCTTCCCTCGCCC |
| | | CTGGATTCATGCCACCTCAAACCTGGCCAGCGGA |
| | | GTGCCAGCCAGATTCTCGGGATCTGGATCGGGG |
| | | ACGTCCTACTCCCTCACCATCTCGCGGGTGGAGG |
| | | CCGAAGATGCCGCCACATACTACTGTCAACAGT |
| | | GGACCTTCAACCCGCCGACCTTTGGAGCGGGGG |
| | | CCAAGCTGGAGCTGAAA |
| CD20-C7 | | |
| SEQ ID NO: | VH | QVQLQQPGAELVKPGASVKMSCKASGYTFTSYNI |
| 2198 | | HWVKQTPGQGLEWIGAIYPGNGDTSYNQKFKGKA |
| | | TLTADKSSTTAFIHFSSLTSEDSVVYYCARSYFYGS |
| | | DSWYFDVWGAGTTVTVSS |
| SEQ ID NO: | DNA VH | CAAGTGCAGCTTCAGCAGCCTGGGGCCGAACTC |
| 2199 | | GTGAAGCCAGGAGCCTCCGTGAAGATGTCATGC |
| | | AAAGCCTCCGGCTACACTTTTACCTCCTACAACA |
| | | TTCATTGGGTCAAGCAGACACCTGGCCAGGGCCT |
| | | GGAATGGATTGGTGCAATCTACCCGGGCAACGG |
| | | AGACACCTCGTACAACCAGAAGTTTAAGGGGAA |
| | | GGCCACCCTGACCGCGGACAAGTCAAGCACTAC |
| | | CGCGTTCATTCACTTCTCGTCCTTGACCTCCGAG |
| | | GATAGCGTGGTGTACTACTGCGCCCGCTCCTATT |
| | | TCTACGGCTCCGATTCGTGGTACTTCGACGTCTG |
| | | GGGAGCCGGAACTACCGTGACCGTGTCCTCC |
| SEQ ID NO: | VL | QIILSQSPAILSASPGEKVTLTCRASSGVPSLHWYQQ |
| 2200 | | KPGSSPKPWIFATSNLASGVPARFSGSGSGTSYSLTI |
| | | SRVEAEDAATYYCQQWWNPPTFGGGTSLEIK |
| SEQ ID NO: | DNA VL | CAAATCATCCTGAGCCAGAGCCCGGCCATCCTGT |
| 2201 | | CGGCTTCACCCGGGGAAAAGGTCACGCTGACTT |
| | | GCCGGGCCTCCTCCGGCGTGCCAAGCCTCCACTG |
| | | GTACCAGCAAAAGCCTGGCTCGTCCCCCAAACC |
| | | CTGGATTTTCGCCACCTCCAACCTGGCTAGCGGA |
| | | GTGCCGGCCAGATTCTCGGGTTCCGGGTCCGGCA |
| | | CCAGCTATTCTCTCACCATCTCCCGGGTCGAGGC |
| | | GGAGGACGCAGCGACTTACTACTGTCAACAGTG |
| | | GATCTTCAATCCGCCCACCTTCGGCGGAGGAACT |
| | | TCCCTGGAAATCAAG |
| CD20-C8 | | |
| SEQ ID NO: | VH | QVQLLQPGAELVKPGASVKMSCKASGYTFTRYNM |
| 2202 | | HWVKQTPGQGLEWIGAIYPGNGDTSYSQKFKGKA |
| | | TLTADKSSSTAYMQLSSLTSEDSAVYYCARSFFYG |
| | | SSDWYFDVWGAGTTVSVSS |
| SEQ ID NO: | DNA VH | CAAGTGCAGCTGCTGCAGCCCGGAGCCGAACTC |
| 2203 | | GTGAAGCCGGGCGCATCCGTGAAAATGAGCTGC |
| | | AAGGCGTCCGGTTACACCTTCACTCGCTACAACA |
| | | TGCACTGGGTCAAGCAGACCCCTGGACAAGGCC |
| | | TGGAGTGGATTGGTGCTATCTACCCGGGAAACG |
| | | GAGACACTAGCTACTCGCAGAAATTCAAGGGAA |
| | | AGGCCACGCTGACCGCCGATAAGTCCTCCTCCAC |
| | | TGCCTACATGCAACTCAGCTCACTGACCTCAGAG |
| | | GACTCGGCCGTGTACTACTGCGCGAGGTCCTTCT |
| | | TCTACGGGTCCTCGGATTGGTACTTCGACGTCTG |
| | | GGGCGCCGGTACCACCGTGTCCGTGTCATCC |
| SEQ ID NO: | VL | QIVLSQSPAILSTSPGEKVTLTCRASSSVNNMHWYQ |
| 2204 | | QKPGSSPKPWIYATSNLASGVPSRFSGSGSGTSYSL |
| | | TISRVEAEDAATYYCQQWIFNPPTFGAGTKLELK |
| SEQ ID NO: | DNA VL | CAGATCGTGCTGAGCCAGTCCCCGGCGATTCTGT |
| 2205 | | CCACCTCGCCTGGGGAAAAGGTCACCCTGACAT |
| | | GTAGAGCCTCCTCCTCCGTGAACAATATGCATTG |
| | | GTATCAGCAGAAGCCAGGATCAAGCCCCAAGCC |
| | | CTGGATCTATGCCACTTCGAACCTTGCCTCTGGA |
| | | GTGCCCTCACGGTTCTCCGGCTCGGGATCGGGGA |
| | | CCAGCTACAGCTTGACTATCTCCCGGGTGGAGGC |
| | | TGAGGACGCCGCAACCTACTACTGCCAGCAATG |
| | | GATCTTCAACCCTCCGACTTTTGGGGCCGGAACC |
| | | AAGCTGGAACTCAAG |
| CD20-3m | | |
| SEQ ID NO: | VH | QVQLVESGGGVVQPGRSLRLSCAASGFTFRDYYM |
| 2206 | | AWVRQAPGKGLEWVASISYEGNPYYGDSVKGRFT |
| | | ISRDNAKSTLYLQMSSLRAEDTAVYYCARHDHNN |
| | | VDWFAYWGQGTLVTV |
| SEQ ID NO: | DNA VH | CAAGTGCAGTTGGTGGAATCAGGAGGAGGTGTC |
| 2207 | | GTGCAACCAGGAAGATCATTGAGGCTCTCATGC |
| | | GCCGCCAGCGGATTCACCTTTCGGGATTACTACA |
| | | TGGCCTGGGTCCGCCAGGCCCCGGGGAAGGGAC |
| | | TGGAATGGGTGGCATCCATCTCGTACGAAGGGA |
| | | ACCCCTACTATGGGGACTCCGTGAAGGGACGGT |
| | | TCACCATCTCCCGGGACAACGCCAAGTCCACCCT |
| | | GTACCTTCAAATGTCCTCGCTGAGGGCGGAGGAT |
| | | ACTGCTGTCTACTACTGTGCCCGCCACGACCATA |
| | | ACAACGTGGACTGGTTCGCCTACTGGGGCCAGG |
| | | GAACCCTCGTCACCGTGTCCTCG |
| SEQ ID NO: | VL | DIVMTQTPLSLSVTPGQPVSMSCKSSQSLLYSENKK |
| 2208 | | NYLAWYLQKPGQSPQLLIFWASTRESGVPDRFSGS |
| | | GSGTDFTLKISRVEAEDVGVYYCQQYYNFPTFGQG |
| | | TKLEIK |
| SEQ ID NO: | DNA VL | GACATTGTGATGACGCAGACTCCCCTGTCGCTCT |
| 2209 | | CCGTGACCCCTGGCCAGCCCGTGTCGATGTCGTG |
| | | CAAGAGCTCCCAGTCCCTGCTGTATTCCGAGAAC |
| | | AAGAAGAATTACCTTGCGTGGTACCTCCAGAAG |
| | | CCGGGGCAGAGCCCGCAGCTGCTGATTTTCTGGG |
| | | CGTCCACTAGAGAGTCTGGAGTGCCTGACCGGTT |
| | | TAGCGGAAGCGGCTCCGGTACTGATTTCACCCTG |
| | | AAAATCTCGCGCGTGGAAGCTGAGGACGTGGGC |
| | | GTGTACTACTGCCAGCAGTACTACAACTTCCCTA |
| | | CTTTCGGACAAGGAACCAAGCTGGAAATCAAG |
| SEQ ID NO: | Linker | GGGGSGGGGSGGGGSGGGGS |
| 1010 | | |
| SEQ ID NO: | scFv (VH- | QVQLVESGGGVVQPGRSLRLSCAASGFTFRDYYM |
| 2210 | linker-VL) | AWVRQAPGKGLEWVASISYEGNPYYGDSVKGRFT |
| | | ISRDNAKSTLYLQMSSLRAEDTAVYYCARHDHNN |
| | | VDWFAYWGQGTLVTVSSGGGGSGGGGSGGGGSG |
| | | GGGSDIVMTQTPLSLSVTPGQPVSMSCKSSQSLLYS |
| | | ENKKNYLAWYLQKPGQSPQLLIFWASTRESGVPD |
| | | RFSGSGSGTDFTLKISRVEAEDVGVYYCQQYYNFP |
| | | TFGQGTKLEIK |
| CD20-3J | | |
| SEQ ID NO: | VH | QVQLVQSGAEVKKPGASVKVSCKASGFTFRDYYM |
| 2211 | | AWVRQAPGQRLEWMGSISYEGNPYYGDSVKGRV |
| | | TITRDNSASTLYMELSSLRSEDTAVYYCARHDHNN |
| | | VDWFAYWGQGTLVTVSS |
| SEQ ID NO: | DNA VH | CAAGTCCAACTCGTCCAGTCCGGTGCAGAAGTC |
| 2212 | | AAGAAACCAGGAGCTTCCGTGAAAGTGTCGTGC |
| | | AAAGCTTCAGGCTTCACCTTCCGCGACTATTACA |
| | | TGGCCTGGGTCCGCCAAGCGCCCGGACAGCGGC |
| | | TGGAGTGGATGGGGTCCATTTCCTACGAGGGGA |
| | | ACCCCTACTATGGAGATTCCGTGAAGGGCAGAG |
| | | TGACGATCACTCGGGATAACTCCGCCTCCACTCT |
| | | CTACATGGAACTGTCCTCGCTTCGGAGCGAAGAT |
| | | ACCGCGGTGTACTACTGCGCCCGCCACGACCATA |
| | | ACAACGTGGACTGGTTCGCCTACTGGGGACAGG |
| | | GGACCCTCGTGACCGTGTCCTCT |
| SEQ ID NO: | VL | DIQMTQSPSSLSASVGDRVTITCKSSQSLLYSENKK |
| 2213 | | NYLAWYQQKPGKVPKLLIFWASTRESGVPSRFSGS |
| | | GSGTDFTLTISSLQPEDVATYYCQQYYNFPTFGQGT |
| | | KLEIK |
| SEQ ID NO: | DNA VL | GACATTCAGATGACCCAGTCCCCGAGCTCGCTGT |
| 2214 | | CCGCCTCCGTGGGAGACAGAGTGACAATCACTT |
| | | GCAAGAGCAGCCAGTCACTGTTGTACTCCGAGA |
| | | ACAAGAAGAACTACCTCGCCTGGTACCAGCAGA |
| | | AGCCGGGAAAGGTCCCTAAGCTGCTGATCTTCTG |
| | | GGCCAGCACTAGGGAGTCGGGAGTGCCGTCACG |
| | | GTTCAGCGGATCGGGATCGGGTACCGACTTCACC |
| | | CTGACTATCTCCTCCCTGCAACCTGAGGACGTGG |
| | | CCACCTACTACTGTCAGCAGTACTACAATTTTCC |
| | | CACCTTCGGCCAGGGTACCAAGCTGGAAATCAA |
| | | G |
| SEQ ID NO: | Linker | GGGGSGGGGSGGGGSGGGGS |
| 1010 | | |
| SEQ ID NO: | scFv (VH- | QVQLVQSGAEVKKPGASVKVSCKASGFTFRDYYM |
| 2215 | linker-VL) | AWVRQAPGQRLEWMGSISYEGNPYYGDSVKGRV |
| | | TITRDNSASTLYMELSSLRSEDTAVYYCARHDHNN |
| | | VDWFAYWGQGTLVTVSSGGGGSGGGGSGGGGSG |
| | | GGGSDIQMTQSPSSLSASVGDRVTITCKSSQSLLYS |
| | | ENKKNYLAWYQQKPGKVPKLLIFWASTRESGVPS |
| | | RFSGSGSGTDFTLTISSLQPEDVATYYCQQYYNFPT |
| | | FGQGTKLEIK |
| CD20-3H5k1 | | |
| SEQ ID NO: | VH | EVQLVQSGAEVKKPGESLKISCKGSGFTFRDYYMA |
| 2216 | | WVRQMPGKGLEWMGSISYEGNPYYGDSVKGQVTI |
| | | SRDNSISTLYLQWSSLKASDTAMYYCARHDHNNV |
| | | DWFAYWGQGTLVTVSS |
| SEQ ID NO: | DNA VH | GAAGTCCAACTGGTGCAGTCAGGAGCAGAAGTC |
| 2217 | | AAAAAACCAGGAGAAAGCCTCAAGATCAGCTGC |
| | | AAGGGCTCGGGTTTCACCTTCCGGGACTACTATA |
| | | TGGCCTGGGTCAGACAGATGCCGGGAAAGGGAC |
| | | TGGAATGGATGGGGTCAATCAGCTACGAGGGCA |
| | | ACCCCTACTACGGAGACTCCGTGAAGGGACAGG |
| | | TCACAATCTCCCGGGACAACTCGATTTCCACTCT |
| | | GTATCTGCAATGGAGCTCCCTCAAGGCCTCCGAC |
| | | ACTGCGATGTACTACTGTGCGCGGCATGACCACA |
| | | ACAATGTGGATTGGTTCGCCTACTGGGGACAGG |
| | | GAACCCTCGTGACCGTGTCCAGC |
| SEQ ID NO: | VL | DIQMTQSPSSLSASVGDRVTITCKSSQSLLYSENKK |
| 2213 | | NYLAWYQQKPGKVPKLLIFWASTRESGVPSRFSGS |
| | | GSGTDFTLTISSLQPEDVATYYCQQYYNFPTFGQGT |
| | | KLEIK |
| SEQ ID NO: | DNA VL | GATATCCAAATGACCCAGTCGCCCTCCTCACTCT |
| 2218 | | CCGCCTCCGTGGGAGATCGCGTGACCATTACTTG |
| | | CAAGAGCTCGCAGTCCCTGCTGTACTCCGAGAAC |
| | | AAGAAGAACTACTTGGCCTGGTACCAGCAGAAG |
| | | CCCGGCAAAGTGCCGAAGCTGCTTATCTTTTGGG |
| | | CCTCGACCAGGGAAAGCGGAGTGCCGTCACGCT |
| | | TCTCCGGCTCCGGGTCTGGCACCGACTTCACTCT |
| | | GACTATTTCCTCCCTGCAACCTGAGGACGTGGCT |
| | | ACCTACTACTGCCAGCAGTACTACAACTTCCCTA |
| | | CCTTCGGCCAAGGGACGAAGCTGGAGATCAAG |
| SEQ ID NO: | Linker | GGGGSGGGGSGGGGSGGGGS |
| 1010 | | |
| SEQ ID NO: | scFv (VH- | EVQLVQSGAEVKKPGESLKISCKGSGFTFRDYYMA |
| 2219 | linker-VL) | WVRQMPGKGLEWMGSISYEGNPYYGDSVKGQVTI |
| | | SRDNSISTLYLQWSSLKASDTAMYYCARHDHNNV |
| | | DWFAYWGQGTLVTVSSGGGGSGGGGSGGGGSGG |
| | | GGSDIQMTQSPSSLSASVGDRVTITCKSSQSLLYSE |
| | | NKKNYLAWYQQKPGKVPKLLIFWASTRESGVPSR |
| | | FSGSGSGTDFTLTISSLQPEDVATYYCQQYYNFPTF |
| | | GQGTKLEIK |
| CD20-3H5k3 | | |
| SEQ ID NO: | VH | EVQLVQSGAEVKKPGESLKISCKGSGFTFRDYYMA |
| 2216 | | WVRQMPGKGLEWMGSISYEGNPYYGDSVKGQVTI |
| | | SRDNSISTLYLQWSSLKASDTAMYYCARHDHNNV |
| | | DWFAYWGQGTLVTVSS |
| SEQ ID NO: | DNA VH | GAAGTGCAGTTGGTCCAATCAGGCGCAGAAGTG |
| 2220 | | AAGAAACCCGGAGAATCATTGAAGATTTCGTGC |
| | | AAAGGAAGCGGGTTCACATTCCGCGATTACTAC |
| | | ATGGCGTGGGTCAGACAGATGCCGGGAAAGGGA |
| | | CTCGAGTGGATGGGGTCCATCAGCTACGAAGGA |
| | | AACCCTTACTACGGGGACTCCGTGAAGGGCCAG |
| | | GTCACCATCTCCCGCGACAACTCAATCTCCACTC |
| | | TGTATCTGCAATGGTCGAGCCTCAAGGCCTCTGA |
| | | TACTGCGATGTACTACTGCGCTCGGCATGACCAC |
| | | AACAACGTGGACTGGTTCGCTTACTGGGGACAG |
| | | GGTACCCTTGTGACCGTGTCCTCC |
| SEQ ID NO: | VL | EIVMTQSPATLSLSPGERATLSCKSSQSLLYSENKK |
| 2221 | | NYLAWYQQKPGQAPRLLIFWASTRESGIPARFSGS |
| | | GSGTDFTLTISSLQPEDLAVYYCQQYYNFPTFGQGT |
| | | KLEIK |
| SEQ ID NO: | DNA VL | GAGATCGTGATGACTCAGTCCCCTGCCACCCTCT |
| 2222 | | CGCTGTCCCCCGGGGAGAGGGCCACGCTGTCCT |
| | | GCAAGAGCTCCCAGTCACTGCTGTATTCCGAAAA |
| | | CAAGAAGAACTACCTCGCCTGGTACCAACAGAA |
| | | GCCGGGACAGGCCCCGCGGCTTCTGATCTTCTGG |
| | | GCCTCCACTCGGGAGTCCGGCATTCCGGCCCGCT |
| | | TCTCCGGCTCGGGGAGCGGAACTGACTTCACCCT |
| | | GACCATCAGCAGCCTGCAGCCAGAGGACCTCGC |
| | | AGTGTACTACTGTCAACAGTACTACAATTTCCCC |
| | | ACCTTTGGCCAGGGTACCAAGCTGGAGATTAAG |
| SEQ ID NO: | Linker | GGGGSGGGGSGGGGSGGGGS |
| 1010 | | |
| SEQ ID NO: | scFv (VH- | EVQLVQSGAEVKKPGESLKISCKGSGFTFRDYYMA |
| 2223 | linker-VL) | WVRQMPGKGLEWMGSISYEGNPYYGDSVKGQVTI |
| | | SRDNSISTLYLQWSSLKASDTAMYYCARHDHNNV |
| | | DWFAYWGQGTLVTVSSGGGGSGGGGSGGGGSGG |
| | | GGSEIVMTQSPATLSLSPGERATLSCKSSQSLLYSE |
| | | NKKNYLAWYQQKPGQAPRLLIFWASTRESGIPARF |
| | | SGSGSGTDFTLTISSLQPEDLAVYYCQQYYNFPTFG |
| | | QGTKLEIK |
| CD20-Ofa | | |
| SEQ ID NO: | HCDR1 | DYAMH |
| 1120 (Kabat) | | |
| SEQ ID NO: | HCDR2 | TISWNSGSIGYADSVKG |
| 2224 (Kabat) | | |
| SEQ ID NO: | HCDR3 | DIQYGNYYYGMDV |
| 2225 (Kabat) | | |
| SEQ ID NO: | HCDR1 | GFTFNDY |
| 2226 (Chothia) | | |
| SEQ ID NO: | HCDR2 | SWNSGS |
| 2227 (Chothia) | | |
| SEQ ID NO: | HCDR3 | DIQYGNYYYGMDV |
| 2225 (Chothia) | | |
| SEQ ID NO: | HCDR1 | GFTFNDYA |
| 2228 (IMGT) | | |
| SEQ ID NO: | HCDR2 | ISWNSGSI |
| 2229 (IMGT) | | |
| SEQ ID NO: | HCDR3 | AKDIQYGNYYYGMDV |
| 2230 (IMGT) | | |
| SEQ ID NO: | VH | EVQLVESGGGLVQPGRSLRLSCAASGFTFNDYAMHWV |
| 2231 | | RQAPGKGLEWVSTISWNSGSIGYADSVKGRFTISRDNA |
| | | KKSLYLQMNSLRAEDTALYYCAKDIQYGNYYYGMDV |
| | | WGQGTTVTVSS |
| SEQ ID NO: | DNA VH | GAGGTGCAGCTGGTCGAGTCGGGGGGAGGATTGGTG |
| 2232 | | CAGCCGGGCAGAAGCCTGCGGCTCTCATGTGCCGCCT |
| | | CCGGCTTCACCTTTAACGACTACGCAATGCACTGGGT |
| | | CAGACAGGCTCCTGGGAAGGGCCTGGAATGGGTGTC |
| | | CACCATTTCCTGGAACTCCGGGAGCATCGGCTACGCT |
| | | GACTCCGTGAAGGGCCGCTTCACGATTAGCCGCGATA |
| | | ACGCGAAAAAGAGCCTGTACCTCCAAATGAACTCCC |
| | | TGCGGGCCGAAGATACCGCCCTTTACTACTGCGCGAA |
| | | GGACATTCAGTATGGAAACTACTACTACGGAATGGA |
| | | CGTCTGGGGACAGGGGACCACAGTGACCGTGTCAAG |
| | | C |
| SEQ ID NO: | LCDR1 | RASQSVSSYLA |
| 2233 (Kabat) | | |
| SEQ ID NO: | LCDR2 | DASNRAT |
| 1287 (Kabat) | | |
| SEQ ID NO: | LCDR3 | QQRSNWPIT |
| 2234 (Kabat) | | |
| SEQ ID NO: | LCDR1 | SQSVSSY |
| 2235 (Chothia) | | |
| SEQ ID NO: | LCDR2 | DAS |
| 2236 (Chothia) | | |
| SEQ ID NO: | LCDR3 | RSNWPI |
| 2237 (Chothia) | | |
| SEQ ID NO: | LCDR1 | QSVSSY |
| 2238 (IMGT) | | |
| SEQ ID NO: | LCDR2 | DAS |
| 2236 (IMGT) | | |
| SEQ ID NO: | LCDR3 | QQRSNWPIT |
| 2234 (IMGT) | | |
| SEQ ID NO: | VL | EIVLTQSPATLSLSPGERATLSCRASQSVSSYLAWYQQK |
| 2239 | | PGQAPRLLIYDASNRATGIPARFSGSGSGTDFTLTISSLEP |
| | | EDFAVYYCQQRSNWPITFGQGTRLEIK |
| SEQ ID NO: | DNA VL | GAAATCGTGCTGACCCAGAGCCCAGCCACTTTGTCAC |
| 2240 | | TGTCCCCCGGCGAAAGAGCCACTCTGTCCTGCCGGGC |
| | | ATCGCAGTCCGTGTCGTCCTACCTGGCCTGGTACCAG |
| | | CAAAAGCCCGGACAAGCCCCTCGCCTTCTCATCTACG |
| | | ACGCCTCCAATCGCGCGACCGGAATCCCGGCCAGGTT |
| | | CTCCGGGAGCGGTTCAGGCACTGACTTCACCCTGACC |
| | | ATCTCGTCCCTGGAGCCGGAGGATTTCGCCGTGTATT |
| | | ACTGCCAGCAGCGGTCCAACTGGCCCATCACCTTCGG |
| | | CCAAGGGACTCGGCTCGAAATCAAG |
| SEQ ID NO: | Linker | GGGGSGGGGSGGGGSGGGGS |
| 1010 | | |
| SEQ ID NO: | scFv (VH- | EVQLVESGGGLVQPGRSLRLSCAASGFTFNDYAMHWV |
| 2241 | linker-VL) | RQAPGKGLEWVSTISWNSGSIGYADSVKGRFTISRDNA |
| | | KKSLYLQMNSLRAEDTALYYCAKDIQYGNYYYGMDV |
| | | WGQGTTVTVSSGGGGSGGGGSGGGGSGGGGSEIVLTQ |
| | | SPATLSLSPGERATLSCRASQSVSSYLAWYQQKPGQAP |
| | | RLLIYDASNRATGIPARFSGSGSGTDFTLTISSLEPEDFAV |
| | | YYCQQRSNWPITFGQGTRLEIK |
| SEQ ID NO: | DNA scFv | GAGGTGCAGCTGGTCGAGTCGGGGGGAGGATTGGTG |
| 2242 | (VH-linker- | CAGCCGGGCAGAAGCCTGCGGCTCTCATGTGCCGCCT |
| | VL) | CCGGCTTCACCTTTAACGACTACGCAATGCACTGGGT |
| | | CAGACAGGCTCCTGGGAAGGGCCTGGAATGGGTGTC |
| | | CACCATTTCCTGGAACTCCGGGAGCATCGGCTACGCT |
| | | GACTCCGTGAAGGGCCGCTTCACGATTAGCCGCGATA |
| | | ACGCGAAAAAGAGCCTGTACCTCCAAATGAACTCCC |
| | | TGCGGGCCGAAGATACCGCCCTTTACTACTGCGCGAA |
| | | GGACATTCAGTATGGAAACTACTACTACGGAATGGA |
| | | CGTCTGGGGACAGGGGACCACAGTGACCGTGTCAAG |
| | | CGGCGGTGGAGGATCTGGCGGAGGAGGTTCCGGTGG |
| | | CGGTGGATCGGGAGGGGGAGGATCGGAAATCGTGCT |
| | | GACCCAGAGCCCAGCCACTTTGTCACTGTCCCCCGGC |
| | | GAAAGAGCCACTCTGTCCTGCCGGGCATCGCAGTCCG |
| | | TGTCGTCCTACCTGGCCTGGTACCAGCAAAAGCCCGG |
| | | ACAAGCCCCTCGCCTTCTCATCTACGACGCCTCCAAT |
| | | CGCGCGACCGGAATCCCGGCCAGGTTCTCCGGGAGC |
| | | GGTTCAGGCACTGACTTCACCCTGACCATCTCGTCCC |
| | | TGGAGCCGGAGGATTTCGCCGTGTATTACTGCCAGCA |
| | | GCGGTCCAACTGGCCCATCACCTTCGGCCAAGGGACT |
| | | CGGCTCGAAATCAAG |
| CD20-3 | | |
| SEQ ID NO: | VH | EVQLVESGGGLVQPGRSLKLSCAASGFTFRDYYMAWV |
| 2243 | | RQAPKKGLEWVASISYEGNPYYGDSVKGRFTISRNNAK |
| | | STLYLQMNSLRSEDTATYYCARHDHNNVDWFAYWGQ |
| | | GTLVTVSS |
| SEQ ID NO: | VL | DIVMTQTPSSQAVSAGEKVTMSCKSSQSLLYSENKKNY |
| 2244 | | LAWYQQKPGQSPKLLIFWASTRESGVPDRFIGSGSGTDF |
| | | TLTISSVQAEDLAVYYCQQYYNFPTFGSGTKLEIK |
| SEQ ID NO: | Linker | GGGGSGGGGSGGGGSGGGGS |
| 1010 | | |
| SEQ ID NO: | scFv (VH- | EVQLVESGGGLVQPGRSLKLSCAASGFTFRDYYMAWV |
| 2245 | linker-VL) | RQAPKKGLEWVASISYEGNPYYGDSVKGRFTISRNNAK |
| | | STLYLQMNSLRSEDTATYYCARHDHNNVDWFAYWGQ |
| | | GTLVTVSSGGGGSGGGGSGGGGSGGGGSDIVMTQTPSS |
| | | QAVSAGEKVTMSCKSSQSLLYSENKKNYLAWYQQKPG |
| | | QSPKLLIFWASTRESGVPDRFIGSGSGTDFTLTISSVQAE |
| | | DLAVYYCQQYYNFPTFGSGTKLEIK |
| CD20-8aBBz | | |
| SEQ ID NO: | VH | EVQLQQSGAELVKPGASVKMSCKASGYTFTSYNMHW |
| 2246 | | VKQTPGQGLEWIGAIYPGNGDTSYNQKFKGKATLTAD |
| | | KSSSTAYMQLSSLTSEDSADYYCARSNYYGSSYWFFDV |
| | | WGAGTTVTVSS |
| SEQ ID NO: | DNA VH | GAGGTGCAACTGCAGCAGTCAGGAGCAGAACTGGTC |
| 2247 | | AAGCCGGGCGCATCCGTCAAGATGAGCTGCAAGGCC |
| | | TCAGGATACACCTTCACTTCATACAACATGCACTGGG |
| | | TCAAGCAGACGCCTGGGCAGGGGCTGGAGTGGATCG |
| | | GTGCCATCTACCCCGGAAACGGCGACACCTCCTACAA |
| | | CCAGAAGTTCAAGGGAAAGGCCACCCTCACCGCTGA |
| | | TAAGTCCAGCAGCACCGCCTACATGCAACTGTCGTCC |
| | | CTGACTTCGGAGGACAGCGCTGACTACTATTGCGCCC |
| | | GCTCTAATTACTACGGTTCCTCCTACTGGTTCTTCGAC |
| | | GTGTGGGGCGCGGGTACCACTGTGACTGTCTCCAGC |
| SEQ ID NO: | VL | DIVLTQSPAILSASPGEKVTMTCRASSSVNYMDWYQKK |
| 2248 | | PGSSPKPWIYATSNLASGVPARFSGSGSGTSYSLTISRVE |
| | | AEDAATYYCQQWSFNPPTFGGGTKLEIK |
| SEQ ID NO: | DNA VL | GACATCGTGCTCACTCAGTCGCCCGCCATTCTGAGCG |
| 2249 | | CTAGCCCCGGCGAAAAGGTCACCATGACCTGTAGAG |
| | | CGTCATCCTCGGTGAACTACATGGACTGGTACCAGAA |
| | | GAAGCCGGGATCGAGCCCTAAGCCATGGATCTACGC |
| | | CACATCCAATCTGGCGTCCGGCGTGCCGGCCCGGTTC |
| | | AGCGGGAGCGGCTCAGGCACCTCCTATTCCCTCACCA |
| | | TCTCGAGAGTGGAGGCTGAGGATGCAGCCACGTACT |
| | | ACTGTCAGCAGTGGTCGTTCAACCCCCCAACCTTTGG |
| | | TGGTGGAACCAAGCTGGAAATCAAG |
| SEQ ID NO: | Linker | GSTSGGGSGGGSGGGGSS |
| 2250 | | |
| SEQ ID NO: | scFv (VH- | DIVLTQSPAILSASPGEKVTMTCRASSSVNYMDWYQKK |
| 2251 | linker-VL) | PGSSPKPWIYATSNLASGVPARFSGSGSGTSYSLTISRVE |
| | | AEDAATYYCQQWSFNPPTFGGGTKLEIKGSTSGGGSGG |
| | | GSGGGGSSEVQLQQSGAELVKPGASVKMSCKASGYTF |
| | | TSYNMHWVKQTPGQGLEWIGAIYPGNGDTSYNQKFKG |
| | | KATLTADKSSSTAYMQLSSLTSEDSADYYCARSNYYGS |
| | | SYWFFDVWGAGTTVTVSS |
| SEQ ID NO: | DNA scFv | GACATCGTGCTCACTCAGTCGCCCGCCATTCTGAGCG |
| 2252 | (VH-linker- | CTAGCCCCGGCGAAAAGGTCACCATGACCTGTAGAG |
| | VL) | CGTCATCCTCGGTGAACTACATGGACTGGTACCAGAA |
| | | GAAGCCGGGATCGAGCCCTAAGCCATGGATCTACGC |
| | | CACATCCAATCTGGCGTCCGGCGTGCCGGCCCGGTTC |
| | | AGCGGGAGCGGCTCAGGCACCTCCTATTCCCTCACCA |
| | | TCTCGAGAGTGGAGGCTGAGGATGCAGCCACGTACT |
| | | ACTGTCAGCAGTGGTCGTTCAACCCCCCAACCTTTGG |
| | | TGGTGGAACCAAGCTGGAAATCAAGGGAAGCACCTC |
| | | CGGCGGAGGTTCCGGAGGAGGGTCCGGAGGCGGAGG |
| | | CAGCTCCGAGGTGCAACTGCAGCAGTCAGGAGCAGA |
| | | ACTGGTCAAGCCGGGCGCATCCGTCAAGATGAGCTG |
| | | CAAGGCCTCAGGATACACCTTCACTTCATACAACATG |
| | | CACTGGGTCAAGCAGACGCCTGGGCAGGGGCTGGAG |
| | | TGGATCGGTGCCATCTACCCCGGAAACGGCGACACCT |
| | | CCTACAACCAGAAGTTCAAGGGAAAGGCCACCCTCA |
| | | CCGCTGATAAGTCCAGCAGCACCGCCTACATGCAACT |
| | | GTCGTCCCTGACTTCGGAGGACAGCGCTGACTACTAT |
| | | TGCGCCCGCTCTAATTACTACGGTTCCTCCTACTGGTT |
| | | CTTCGACGTGTGGGGCGCGGGTACCACTGTGACTGTC |
| | | TCCAGC |

[0405] In some embodiments, the antigen binding domain comprises a HC CDR1, a HC CDR2, and a HC CDR3 of any heavy chain binding domain amino acid sequences listed in Table 32. In embodiments, the antigen binding domain further comprises a LC CDR1, a LC CDR2, and a LC CDR3. In embodiments, the antigen binding domain comprises a LC CDR1, a LC CDR2, and a LC CDR3 amino acid sequences listed in Table 32.

[0406] In some embodiments, the antigen binding domain comprises one, two or all of LC CDR1, LC CDR2, and LC CDR3 of any light chain binding domain amino acid sequences listed in Table 32, and one, two or all of HC CDR1, HC CDR2, and HC CDR3 of any heavy chain binding domain amino acid sequences listed in Table 32.

[0407] In some embodiments, the CDRs are defined according to the Kabat numbering scheme, the Chothia numbering scheme, or a combination thereof.

### CD22 CAR and CD22-Binding Sequences

[0408] In some embodiments, the TOX^{hi} CAR cell described herein is a CD22 CAR-expressing cell (e.g., a cell expressing a CAR that binds to human CD22). In some embodiments, the CD22 CAR-expressing cell includes an antigen binding domain according to WO2016/164731 and PCT/US2017/055627, incorporated herein by reference. Exemplary CD22-binding sequences or CD22 CAR sequences are disclosed in, e.g., Tables 6A, 6B, 7A, 7B, 7C, 8A, 8B, 9A, 9B, 10A, and 10B of WO2016/164731 and Tables 6-10 of PCT/US2017/055627. In some embodiments, the CD22-binding sequences or CD22 CAR sequences comprise a CDR, variable region, scFv or full-length sequence of a CD22 CAR disclosed in PCT/US2017/055627 or WO2016/164731.

[0409] In embodiments, the CAR molecule comprises an antigen binding domain that binds specifically to CD22 (CD22 CAR). In some embodiments, the antigen binding domain targets human CD22. In some embodiments, the antigen binding domain includes a single chain Fv sequence as described herein.

[0410] The sequences of human CD22 CAR are provided below. In some embodiments, a human CD22 CAR is CAR22-65.

Human CD22 CAR scFv sequence
(SEQ ID NO: 2253)
EVQLQQSGPGLVKPSQTLSLTCAISGDSMLSNSDTWNWIRQSPSRGLEWL
GRTYHRSTWYDDYASSVRGRVSINVDTSKNQYSLQLNAVTPEDTGVYYCA
RVRLQDGNSWSDAFDVWGQGTMVTVSSGGGGSGGGGSGGGGSQSALTQPA
SASGSPGQSVTISCTGTSSDVGGYNYVSWYQQHPGKAPKLMIYDVSNRPS
GVSNRFSGSKSGNTASLTISGLQAEDEADYYCSSYTSSSTLYVFGTGTQL
TVL
Human CD22 CAR heavy chain variable region
(SEQ ID NO 2254)
EVQLQQSGPGLVKPSQTLSLTCAISGDSMLSNSDTWNWIRQSPSRGLEWL
GRTYHRSTWYDDYASSVRGRVSINVDTSKNQYSLQLNAVTPEDTGVYYCA
RVRLQDGNSWSDAFDVWGQGTMVTVSS
Human CD22 CAR light chain variable region
(SEQ ID NO 2255)
QSALTQPASASGSPGQSVTISCTGTSSDVGGYNYVSWYQQHPGKAPKLMI
YDVSNRPSGVSNRFSGSKSGNTASLTISGLQAEDEADYYCSSYTSSSTLY
VFGTGTQLTVL

TABLE 20
Heavy Chain Variable Domain CDRs of CD22 CAR (CAR22-65)

| | | SEQ ID | | SEQ ID | | SEQ ID |
|---|---|---|---|---|---|---|
| Candidate | HCDR1 | NO: | HCDR2 | NO: | HCDR3 | NO: |
| CAR22-65 | GDSML | 2256 | RTYHRSTWYDDY | 2258 | VRLQDGNSWS | 2259 |
| Combined | SNSDT | | ASSVRG | | DAFDV | |
| | WN | | | | | |
| CAR22-65 | SNSDT | 2257 | RTYHRSTWYDDY | 2258 | VRLQDGNSWS | 2259 |
| Kabat | WN | | ASSVRG | | DAFDV | |

TABLE 21
Light Chain Variable Domain CDRs of CD22 CAR
CAR22-65). The LC CDR sequences in this table
have the same sequence under the Kabat or
combined definitions.

| | | SEQ | | SEQ | | SEQ |
|---|---|---|---|---|---|---|
| | | ID | | ID | | ID |
| Candidate | LCDR1 | NO: | LCDR2 | NO: | LCDR3 | NO: |
| CAR22-65 | TGTSSDVG | 2260 | DVSNRPS | 2261 | SSYTSSST | 2262 |
| Combined | GYNYVS | | | | LYV | |

[0411] In some embodiments, the antigen binding domain comprises a HC CDR1, a HC CDR2, and a HC CDR3 of any heavy chain binding domain amino acid sequences listed in Table 20. In embodiments, the antigen binding domain further comprises a LC CDR1, a LC CDR2, and a LC CDR3. In embodiments, the antigen binding domain comprises a LC CDR1, a LC CDR2, and a LC CDR3 amino acid sequences listed in Table 21.

[0412] In some embodiments, the antigen binding domain comprises one, two or all of LC CDR1, LC CDR2, and LC CDR3 of any light chain binding domain amino acid sequences listed in Table 21, and one, two or all of HC CDR1, HC CDR2, and HC CDR3 of any heavy chain binding domain amino acid sequences listed in Table 20.

[0413] In some embodiments, the CDRs are defined according to the Kabat numbering scheme, the Chothia numbering scheme, or a combination thereof.

[0414] The order in which the VL and VH domains appear in the scFv can be varied (i.e., VL-VH, or VH-VL orientation), and where any of one, two, three or four copies of the “G4S” (SEQ ID NO: 1039) subunit, in which each subunit comprises the sequence GGGGS (SEQ ID NO: 1039) (e.g., (G4S)₃ (SEQ ID NO: 1011) or (G4S)₄ (SEQ ID NO: 1010)), can connect the variable domains to create the entirety of the scFv domain. Alternatively, the CAR construct can include, for example, a linker including the sequence GSTSGSGKPGSGEGSTKG (SEQ ID NO: 2263). Alternatively, the CAR construct can include, for example, a linker including the sequence LAEAAAK (SEQ ID NO: 2264). In some embodiments, the CAR construct does not include a linker between the VL and VH domains.

[0415] These clones all contained a Q/K residue change in the signal domain of the co-stimulatory domain derived from CD3zeta chain.

### EGFRvIII CAR and EGFRvIII-Binding Sequences

[0416] In some embodiments, the TOX^{hi} CAR cell described herein is an EGFR CAR-expressing cell (e.g., a cell expressing a CAR that binds to human EGFR). In some embodiments, the CAR-expressing cell described herein is an EGFRvIII CAR-expressing cell (e.g., a cell expressing a CAR that binds to human EGFRvIII). Exemplary EGFRvIII CARs can include sequences disclosed in WO2014/130657, e.g., Table 2 of WO2014/130657, incorporated herein by reference.

[0417] Exemplary EGFRvIII-binding sequences or EGFR CAR sequences may comprise a CDR, a variable region, an scFv, or a full-length CAR sequence of a sequence disclosed in Table 18 (or a sequence at least about 85%, 90%, 95%, 99% or more identical thereto, and/or having one, two, three or more substitutions, insertions, deletions, or modifications).

TABLE 18
Humanized EGFRvIII CAR Constructs

| | | |
|---|---|---|
| | SEQ ID | |
| Name | NO: | Sequence |

CAR 1

| | | |
|---|---|---|
| CAR1 | SEQ ID | eiqlvqsgaevkkpgatvkisckgsgfniedyyihwvqqapgkglewmgridpendet |
| scFv | NO: 1358 | kygpifqgrvtitadtstntvymelsslrsedtavyycafrggvywgqgttvtvssggggsg |
| domain | | gggsggggsggggsdvvmtqspdslayslgeratincks sqslldsdgktylnwlqqkpg |
| | | qppkrlislvskldsgvpdrfsgsgsgtdftltisslqaedvavyycwqgthfpgtfgggtkv |
| | | eik |
| CAR1 | SEQ ID | gaaatccagctggtccaatcgggagctgaggtcaagaagccgggagccaccgtcaagatct |
| scFv | NO: 1359 | catgcaaggggtcgggattcaacatcgaggactactacattcactgggtgcagcaagctccg |
| domain nt | | ggaaaaggcctggaatggatgggcagaatcgacccagaaaacgacgaaactaagtacgga |
| | | ccgattttccaaggaagagtgactatcaccgccgatacttcaaccaataccgtctacatggaac |
| | | tgagctcgctccggtccgaagatactgcagtgtattactgtgcctttcgcggaggggtgtactg |
| | | gggccaaggaactactgtcactgtctcgtcaggaggcggagggtcgggaggaggcgggag |
| | | cggaggcggtggctcgggtggcggaggaagcgacgtggtgatgacccagtccccggactc |
| | | cctcgccgtgagcctcggagagagggcgactatcaattgcaagtcgtcccagtcacttctgga |
| | | ttccgatggtaaaacgtacctcaactggctgcagcaaaagccagggcagccacccaaacggt |
| | | tgatctcccttgtgtccaaactggatagcggagtgcctgaccgcttctcgggttccggtagcgg |
| | | gaccgacttcaccctgacgatcagctcactgcaggcggaggacgtggcagtgtactactgct |
| | | ggcagggaacccacttccctggcacctttggaggtggcaccaaggtggagatcaag |
| CAR1 | SEQ ID | atggccctccctgtcaccgccctgctgcttccgctggctcttctgctccacgccgctcggcccg |
| Soluble | NO: 1360 | aaatccagctggtccaatcgggagctgaggtcaagaagccgggagccaccgtcaagatctc |
| scFv - nt | | atgcaaggggtcgggattcaacatcgaggactactacattcactgggtgcagcaagctccgg |
| | | gaaaaggcctggaatggatgggcagaatcgacccagaaaacgacgaaactaagtacggac |
| | | cgattttccaaggaagagtgactatcaccgccgatacttcaaccaataccgtctacatggaact |
| | | gagctcgctccggtccgaagatactgcagtgtattactgtgcctttcgcggaggggtgtactgg |
| | | ggccaaggaactactgtcactgtctcgtcaggaggcggagggtcgggaggaggcgggagc |
| | | ggaggcggtggctcgggtggcggaggaagcgacgtggtgatgacccagtccccggactcc |
| | | ctcgccgtgagcctcggagagagggcgactatcaattgcaagtcgtcccagtcacttctggatt |
| | | ccgatggtaaaacgtacctcaactggctgcagcaaaagccagggcagccacccaaacggtt |
| | | gatctcccttgtgtccaaactggatagcggagtgcctgaccgcttctcgggttccggtagcggg |
| | | accgacttcaccctgacgatcagctcactgcaggcggaggacgtggcagtgtactactgctg |
| | | gcagggaacccacttccctggcacctttggaggtggcaccaaggtggagatcaagggatcg |
| | | caccaccatcaccatcatcatcac |
| CAR1 | SEQ ID | Malpvtalllplalllhaarpeiqlvqsgaevkkpgatvkisckgsgfniedyyihwvqqap |
| Soluble | NO: 1361 | gkglewmgridpendetkygpifqgrvtitadtstntvymelsslrsedtavyycafrggvy |
| scFv - aa | | wgqgttvtvssggggsggggsggggsggggsdvvmtqspdslayslgeratinckssqsl |
| | | ldsdgktylnwlqqkpgqppkrlislvskldsgvpdrfsgsgsgtdftltisslqaedvavyy |
| | | cwqgthfpgtfgggtkveikgshhhhhhhh |
| CAR 1 - | SEQ ID | atggccctccctgtcaccgccctgctgcttccgctggctcttctgctccacgccgctcggcccg |
| Full - nt | NO: 1362 | agatccagctggtgcagtcgggagctgaagtcaaaaagcctggcgcaaccgtcaagatctcg |
| lentivirus | | tgcaaaggatcagggttcaacatcgaggactactacatccattgggtgcaacaggcacccgg |
| | | aaaaggcctggagtggatggggaggattgacccagaaaatgacgaaaccaagtacggacc |
| | | gatcttccaaggacgggtgaccatcacggctgacacttccactaacaccgtctacatggaact |
| | | ctcgagccttcgctcggaagataccgcggtgtactactgcgcctttagaggtggagtctactgg |
| | | ggacaagggactaccgtcaccgtgtcgtcaggtggcggaggatcaggcggaggcggctcc |
| | | ggtggaggaggaagcggaggaggtggctccgacgtggtgatgacgcagtcaccggactcc |
| | | ttggcggtgagcctgggtgaacgcgccactatcaactgcaagagctcccagagcttgctgga |
| | | ctccgatggaaagacttatctcaattggctgcaacagaagcctggccagccgccaaagagac |
| | | tcatctcactggtgagcaagctggatagcggagtgccagatcggttttcgggatcgggctcag |
| | | gcaccgacttcaccctgactatttcctccctccaagccgaggatgtggccgtctactactgttgg |
| | | caggggactcacttcccggggaccttcggtggaggcactaaggtggagatcaaaaccactac |
| | | cccagcaccgaggccacccaccccggctcctaccatcgcctcccagcctctgtccctgcgtc |
| | | cggaggcatgtagacccgcagctggtggggccgtgcatacccggggtcttgacttcgcctgc |
| | | gatatctacatttgggcccctctggctggtacttgcggggtcctgctgctttcactcgtgatcact |
| | | ctttactgtaagcgcggtcggaagaagctgctgtacatctttaagcaacccttcatgaggcctgt |
| | | gcagactactcaagaggaggacggctgttcatgccggttcccagaggaggaggaaggcgg |
| | | ctgcgaactgcgcgtgaaattcagccgcagcgcagatgctccagcctacaagcaggggcag |
| | | aaccagctctacaacgaactcaatcttggtcggagagaggagtacgacgtgctggacaagcg |
| | | gagaggacgggacccagaaatgggcgggaagccgcgcagaaagaatccccaagagggc |
| | | ctgtacaacgagctccaaaaggataagatggcagaagcctatagcgagattggtatgaaagg |
| | | ggaacgcagaagaggcaaaggccacgacggactgtaccagggactcagcaccgccacca |
| | | aggacacctatgacgctcttcacatgcaggccctgccgcctcgg |
| CAR 1 - | SEQ ID | malpvtalllplalllhaarpeiqlvqsgaevkkpgatvkisckgsgfniedyyihwvqqap |
| Full - aa | NO: 1363 | gkglewmgridpendetkygpifqgrvtitadtstntvymelsslisedtavyycafrgg |
| | | vywgqgttvtvssggggsggggsggggsggggsdvvmtqspdslayslgeratinckss |
| | | qslldsdgktylnwlqqkpgqppkrlislvskldsgvpdrfsgsgsgtdftltisslqaedva |
| | | vyycwqgthfpgtfgggtkveiktttpaprpptpaptiasqplslrpeacrpaaggavhtrg |
| | | ldfacdiyiwaplagtcgvlllslvitlyckrgrkkllyifkqpfmrpvqttqeedgcscrfpe |
| | | eeeggcelrvkfsrsadapaykqgqnqlynelnlgrreeydvldkrrgrdpemggkprrk |
| | | npqeglynelqkdkmaeayseigmkgerrrgkghdglyqglstatkdtydalhmqalpp |
| | | r |

CAR2

| | | |
|---|---|---|
| CAR2 | SEQ ID | dvvmtqspdslayslgeratinckssqslldsdgktylnwlqqkpgqppkrlislvskldsg |
| scFv | NO: 1364 | vpdrfsgsgsgtdftltisslqaedvavyycwqgthfpgtfgggtkveikggggsggggsg |
| domain | | gggsggggseiqlvqsgaevkkpgatvkisckgsgfniedyyihwvqqapgkglewm |
| | | gridpendetkygpifqgrvtitadtstntvymelsslrsedtavyycafrggvywgqgttvt |
| | | vss |
| CAR2 | SEQ ID | gatgtcgtgatgacccagtccccagactccctcgcagtgtccttgggagaacgggccaccatc |
| scFv | NO: 1365 | aactgcaaatcgagccagtcactgctggactcagacggaaagacctacctcaactggctgca |
| domain - nt | | gcagaagcctggccagccaccgaagcgcctgatctccctggtgtccaagctggactcgggc |
| | | gtcccggacaggtttagcggtagcggctcgggaaccgacttcactctgaccattagctcgctc |
| | | caagctgaagatgtggcggtctactactgctggcaggggacccacttccccgggacctttggc |
| | | ggaggaactaaagtcgaaatcaaaggaggaggcggatcaggtggaggaggcagcggagg |
| | | aggagggagcggcggtggcggctccgaaattcaacttgtgcaatccggtgccgaggtgaag |
| | | aaacctggtgccactgtcaagatctcgtgtaagggatcgggattcaatatcgaggactactaca |
| | | tccactgggtgcaacaggcgccaggaaagggattggagtggatgggtcgcatcgacccgga |
| | | aaacgatgagactaagtacggaccgatcttccaaggccgggtcacgatcactgcggatacct |
| | | ccactaataccgtgtatatggagctctcgtcactgagaagcgaagatacggccgtgtactactg |
| | | cgcattcagaggaggtgtgtactggggccagggaactactgtgaccgtgtcgtcg |
| CAR2 - | SEQ ID | atggccctccctgtcaccgccctgctgcttccgctggctcttctgctccacgccgctcggcccg |
| Soluble | NO: 1366 | atgtcgtgatgacccagtccccagactccctcgcagtgtccttgggagaacgggccaccatca |
| scFv - nt | | actgcaaatcgagccagtcactgctggactcagacggaaagacctacctcaactggctgcag |
| | | cagaagcctggccagccaccgaagcgcctgatctccctggtgtccaagctggactcgggcgt |
| | | cccggacaggtttagcggtagcggctcgggaaccgacttcactctgaccattagctcgctcca |
| | | agctgaagatgtggcggtctactactgctggcaggggacccacttccccgggacctttggcg |
| | | gaggaactaaagtcgaaatcaaaggaggaggcggatcaggtggaggaggcagcggagga |
| | | ggagggagcggcggtggcggctccgaaattcaacttgtgcaatccggtgccgaggtgaaga |
| | | aacctggtgccactgtcaagatctcgtgtaagggatcgggattcaatatcgaggactactacat |
| | | ccactgggtgcaacaggcgccaggaaagggattggagtggatgggtcgcatcgacccgga |
| | | aaacgatgagactaagtacggaccgatcttccaaggccgggtcacgatcactgcggatacct |
| | | ccactaataccgtgtatatggagctctcgtcactgagaagcgaagatacggccgtgtactactg |
| | | cgcattcagaggaggtgtgtactggggccagggaactactgtgaccgtgtcgtcggggtcac |
| | | atcaccaccatcatcatcaccac |
| CAR2 - | SEQ ID | malpvtalllplalllhaarpdvvmtqspdslayslgeratinckssqslldsdgktylnwlqq |
| Soluble | NO: 1367 | kpgqppkrlislvskldsgvpdrfsgsgsgtdftltisslqaedvavyycwqgthfpgtfggg |
| scFv - aa | | tkveikggggsggggsggggsggggseiqlvqsgaevkkpgatvkisckgsgfniedyyi |
| | | hwvqqapgkglewmgridpendetkygpifqgrvtitadtstntvymelsslrsedtavy |
| | | ycafrggvywgqgttvtvssgshhhhhhhh |
| CAR 2 - | SEQ ID | atggccctccctgtcaccgccctgctgcttccgctggctcttctgctccacgccgctcggcccg |
| Full - nt | NO: 1368 | acgtggtcatgactcaaagcccagattccttggctgtctcccttggagaaagagcaacgatcaa |
| | | ttgcaaaagctcgcagtccctgttggactccgatggaaaaacctacctcaactggctgcagca |
| | | gaagccgggacaaccaccaaagcggctgatttccctcgtgtccaagctggacagcggcgtg |
| | | ccggatcgcttctcgggcagcggctcgggaaccgattttactctcactatttcgtcactgcaagc |
| | | ggaggacgtggcggtgtattactgctggcagggcactcacttcccgggtacttttggtggagg |
| | | taccaaagtcgaaatcaagggtggaggcgggagcggaggaggcgggtcgggaggagga |
| | | ggatcgggtggcggaggctcagaaatccagctggtgcagtcaggtgccgaagtgaagaag |
| | | cctggggccacggtgaagatctcgtgcaaggggagcggattcaacatcgaggattactacat |
| | | ccattgggtgcaacaggcccctggcaaagggctggaatggatgggaaggatcgaccccga |
| | | gaatgacgagactaagtacggcccgatcttccaaggacgggtgaccatcactgcagacactt |
| | | caaccaacaccgtctacatggaactctcctcgctgcgctccgaggacaccgccgtgtactact |
| | | gtgctttcagaggaggagtctactggggacagggaacgaccgtgaccgtcagctcaaccact |
| | | accccagcaccgaggccacccaccccggctcctaccatcgcctcccagcctctgtccctgcg |
| | | tccggaggcatgtagacccgcagctggtggggccgtgcatacccggggtcttgacttcgcct |
| | | gcgatatctacatttgggcccctctggctggtacttgcggggtcctgctgctttcactcgtgatca |
| | | ctctttactgtaagcgcggtcggaagaagctgctgtacatctttaagcaacccttcatgaggcct |
| | | gtgcagactactcaagaggaggacggctgttcatgccggttcccagaggaggaggaaggcg |
| | | gctgcgaactgcgcgtgaaattcagccgcagcgcagatgctccagcctacaagcaggggca |
| | | gaaccagctctacaacgaactcaatcttggtcggagagaggagtacgacgtgctggacaagc |
| | | ggagaggacgggacccagaaatgggcgggaagccgcgcagaaagaatccccaagaggg |
| | | cctgtacaacgagctccaaaaggataagatggcagaagcctatagcgagattggtatgaaag |
| | | gggaacgcagaagaggcaaaggccacgacggactgtaccagggactcagcaccgccacc |
| | | aaggacacctatgacgctcttcacatgcaggccctgccgcctcgg |
| CAR 2 - | SEQ ID | malpvtalllplalllhaarpdvvmtqspdslayslgeratinckssqslldsdgktylnwlq |
| Full - aa | NO: 1369 | qkpgqppkrlislvskldsgvpdrfsgsgsgtdftltisslqaedvavyycwqgthfpgtfg |
| | | ggtkveikggggsggggsggggsggggseiqlvqsgaevkkpgatvkisckgsgfnied |
| | | yyihwvqqapgkglewmgridpendetkygpifqgrvtitadtstntvymelsslrsed |
| | | tavyycafrggvywgqgttvtvsstttpaprpptpaptiasqplslrpeacrpaaggavhtrg |
| | | ldfacdiyiwaplagtcgvlllslvitlyckrgrkkllyifkqpfmrpvqttqeedgcscrfpe |
| | | eeeggcelrvkfsrsadapaykqgqnqlynelnlgrreeydvldkrrgrdpemggkprrk |
| | | npqeglynelqkdkmaeayseigmkgerrrgkghdglyqglstatkdtydalhmqalpp |
| | | r |

CAR 3

| | | |
|---|---|---|
| CAR3 | SEQ ID | eiqlvqsgaevkkpgeslrisckgsgfniedyyihwvrqmpgkglewmgridpendetk |
| scFv | NO: 1370 | ygpifqghvtisadtsintvylqwsslkasdtamyycafrggvywgqgttvtvssggggsg |
| domain | | gggsggggsggggsdvvmtqsplslpvtlgqpasisckssqslldsdgktylnwlqqrpg |
| | | qsprrlislvskldsgvpdrfsgsgsgtdftlkisrveaedvgvyycwqgthfpgtfgggtkv |
| | | eik |
| CAR3 | SEQ ID | gagattcagctggtccaaagcggcgcagaagtgaaaaagccaggggaatcgttgcgcatca |
| scFv | NO: 1371 | gctgtaaaggttccggcttcaacatcgaggactattacatccattgggtgcggcagatgccag |
| domain nt | | gaaaggggctggaatggatgggacggattgacccggagaacgacgaaaccaagtacggac |
| | | cgatctttcaaggacacgtgactatctccgccgacaccagcatcaatacggtgtacctccaatg |
| | | gtcctcactcaaggcctcggataccgcgatgtactactgcgcgttcagaggaggcgtctactg |
| | | gggacaagggactactgtgactgtctcatcaggaggtggaggaagcggaggaggtggctcg |
| | | ggcggaggtggatcgggaggaggagggtccgatgtggtgatgacccagtccccactgtcgc |
| | | tcccggtgaccctcggacagcctgctagcatctcgtgcaaatcctcgcaatccctgctggactc |
| | | ggacggaaaaacgtacctcaattggctgcagcagcgccctggccagagcccgagaaggctt |
| | | atctcgctggtgtcaaagctggatagcggtgtgcccgaccggttcagcggctcagggtcagg |
| | | aaccgatttcaccttgaagatctcccgcgtggaagccgaagatgtcggagtctactactgctgg |
| | | cagggtactcacttcccggggacctttggtggcggcactaaggtcgagattaag |
| CAR 3 - | SEQ ID | atggccctccctgtcaccgccctgctgcttccgctggctcttctgctccacgccgctcggcccg |
| Soluble | NO: 1372 | agattcagctggtccaaagcggcgcagaagtgaaaaagccaggggaatcgttgcgcatcag |
| scFv - nt | | ctgtaaaggttccggcttcaacatcgaggactattacatccattgggtgcggcagatgccagga |
| | | aaggggctggaatggatgggacggattgacccggagaacgacgaaaccaagtacggaccg |
| | | atctttcaaggacacgtgactatctccgccgacaccagcatcaatacggtgtacctccaatggt |
| | | cctcactcaaggcctcggataccgcgatgtactactgcgcgttcagaggaggcgtctactggg |
| | | gacaagggactactgtgactgtctcatcaggaggtggaggaagcggaggaggtggctcggg |
| | | cggaggtggatcgggaggaggagggtccgatgtggtgatgacccagtccccactgtcgctc |
| | | ccggtgaccctcggacagcctgctagcatctcgtgcaaatcctcgcaatccctgctggactcg |
| | | gacggaaaaacgtacctcaattggctgcagcagcgccctggccagagcccgagaaggctta |
| | | tctcgctggtgtcaaagctggatagcggtgtgcccgaccggttcagcggctcagggtcagga |
| | | accgatttcaccttgaagatctcccgcgtggaagccgaagatgtcggagtctactactgctggc |
| | | agggtactcacttcccggggacctttggtggcggcactaaggtcgagattaagggctcacacc |
| | | atcatcaccatcaccaccac |
| CAR 3 - | SEQ ID | malpvtalllplalllhaarpeiqlvqsgaevkkpgeslrisckgsgfniedyyihwvrqmp |
| Soluble | NO: 1373 | gkglewmgridpendetkygpifqghvtisadtsintvylqwsslkasdtamyycafrgg |
| scFv - aa | | vywgqgttvtvssggggsggggsggggsggggsdvvmtqsplslpvtlgqpasisckss |
| | | qslldsdgktylnwlqqrpgqsprrlislvskldsgvpdrfsgsgsgtdftlkisrveaedvgv |
| | | yycwqgthfpgtfgggtkveikgshhhhhhhh |
| CAR 3 - | SEQ ID | atggccctccctgtcaccgccctgctgcttccgctggctcttctgctccacgccgctcggcccg |
| Full - nt | NO: 1374 | aaatccagctggtgcaaagcggagccgaggtgaagaagcccggagaatccctgcgcatctc |
| | | gtgtaagggttccggctttaacatcgaggattactacatccactgggtgagacagatgccggg |
| | | caaaggtctggaatggatgggccgcatcgacccggagaacgacgaaaccaaatacggacc |
| | | aatcttccaaggacatgtgactatttccgcggatacctccatcaacactgtctacttgcagtgga |
| | | gctcgctcaaggcgtcggataccgccatgtactactgcgcattcagaggaggtgtgtactggg |
| | | gccagggcactacggtcaccgtgtcctcgggaggtggagggtcaggaggcggaggctcgg |
| | | gcggtggaggatcaggcggaggaggaagcgatgtggtcatgactcaatccccactgtcact |
| | | gcctgtcactctggggcaaccggcttccatctcatgcaagtcaagccaatcgctgctcgactcc |
| | | gacggaaaaacctacctcaattggcttcagcagcgcccaggccagtcgcctcggaggctgat |
| | | ctcactcgtgtcgaagcttgactccggggtgccggatcggtttagcggaagcggatcgggga |
| | | ccgacttcacgttgaagattagccgggtggaagccgaggacgtgggagtctattactgctggc |
| | | aggggacccacttcccggggactttcggaggaggcaccaaagtcgagattaagaccactac |
| | | cccagcaccgaggccacccaccccggctcctaccatcgcctcccagcctctgtccctgcgtc |
| | | cggaggcatgtagacccgcagctggtggggccgtgcatacccggggtcttgacttcgcctgc |
| | | gatatctacatttgggcccctctggctggtacttgcggggtcctgctgctttcactcgtgatcact |
| | | ctttactgtaagcgcggtcggaagaagctgctgtacatctttaagcaacccttcatgaggcctgt |
| | | gcagactactcaagaggaggacggctgttcatgccggttcccagaggaggaggaaggcgg |
| | | ctgcgaactgcgcgtgaaattcagccgcagcgcagatgctccagcctacaagcaggggcag |
| | | aaccagctctacaacgaactcaatcttggtcggagagaggagtacgacgtgctggacaagcg |
| | | gagaggacgggacccagaaatgggcgggaagccgcgcagaaagaatccccaagagggc |
| | | ctgtacaacgagctccaaaaggataagatggcagaagcctatagcgagattggtatgaaagg |
| | | ggaacgcagaagaggcaaaggccacgacggactgtaccagggactcagcaccgccacca |
| | | aggacacctatgacgctcttcacatgcaggccctgccgcctcgg |
| CAR 3 - | SEQ ID | malpvtalllplalllhaarpeiqlvqsgaevkkpgeslrisckgsgfniedyyihwvrqmp |
| Full - aa | NO: 1375 | gkglewmgridpendetkygpifqghvtisadtsintvylqwsslkasdtamyycafrg |
| | | gvywgqgttvtvssggggsggggsggggsggggsdvvmtqsplslpvtlgqpasiscks |
| | | sqslldsdgktylnwlqqrpgqsprrlislvskldsgvpdrfsgsgsgtdftlkisrveaedv |
| | | gvyycwqgthfpgtfgggtkveiktttpaprpptpaptiasqplslrpeacrpaaggavhtr |
| | | gldfacdiyiwaplagtcgvlllslvitlyckrgrkkllyifkqpfmrpvqttqeedgcscrfp |
| | | eeeeggcelrvkfsrsadapaykqgqnqlynelnlgrreeydvldkrrgrdpemggkprr |
| | | knpqeglynelqkdkmaeayseigmkgerrrgkghdglyqglstatkdtydalhmqalp |
| | | pr |

CAR4

| | | |
|---|---|---|
| CAR4 | SEQ ID | dvvmtqsplslpvtlgqpasisckssqslldsdgktylnwlqqrpgqsprrlislvskldsgv |
| scFv | NO: 1376 | pdrfsgsgsgtdftlkisrveaedvgvyycwqgthfpgtfgggtkveikggggsggggsg |
| domain | | gggsggggseiqlvqsgaevkkpgeslrisckgsgfniedyyihwvrqmpgkglewmg |
| | | ridpendetkygpifqghvtisadtsintvylqwsslkasdtamyycafrggvywgqgttv |
| | | tvss |
| CAR4 | SEQ ID | gacgtcgtcatgacccagagcccgctgtcactgcctgtgaccctgggccagccggcgtccat |
| scFv | NO: 1377 | tagctgcaaatcctcgcaatccctgctcgactcagacggaaaaacgtacttgaactggctccaa |
| domain nt | | cagcgccctgggcaatccccaaggcggcttatctcactcgtcagcaagctcgatagcggtgtc |
| | | ccagacagattttcgggctcgggatcgggcactgatttcactctgaagatctcgcgggtggaa |
| | | gccgaggatgtgggagtgtactattgctggcagggcactcacttccccgggacgtttggcgg |
| | | aggaactaaggtcgagatcaaaggaggaggtggatcaggcggaggtgggagcggaggag |
| | | gaggaagcggtggtggaggttccgaaatccagctggtgcaatcaggagccgaggtgaaga |
| | | agccgggagaatccctgcgcatctcgtgcaagggctcgggcttcaacatcgaggattactac |
| | | atccactgggtgcggcagatgccgggaaaggggttggaatggatgggacgcattgacccgg |
| | | aaaatgatgaaaccaaatacgggccaatcttccaaggccacgtgaccattagcgctgacactt |
| | | ccatcaacaccgtgtaccttcagtggtcctcactgaaggcgtcggacactgccatgtactactg |
| | | tgcattcagaggaggggtctactggggacagggcaccaccgtgaccgtgagctcc |
| CAR4 - | SEQ ID | atggccctccctgtcaccgccctgctgcttccgctggctcttctgctccacgccgctcggcccg |
| Soluble | NO: 1378 | acgtcgtcatgacccagagcccgctgtcactgcctgtgaccctgggccagccggcgtccatta |
| scFv - nt | | gctgcaaatcctcgcaatccctgctcgactcagacggaaaaacgtacttgaactggctccaac |
| | | agcgccctgggcaatccccaaggcggcttatctcactcgtcagcaagctcgatagcggtgtcc |
| | | cagacagattttcgggctcgggatcgggcactgatttcactctgaagatctcgcgggtggaag |
| | | ccgaggatgtgggagtgtactattgctggcagggcactcacttccccgggacgtttggcgga |
| | | ggaactaaggtcgagatcaaaggaggaggtggatcaggcggaggtgggagcggaggagg |
| | | aggaagcggtggtggaggttccgaaatccagctggtgcaatcaggagccgaggtgaagaa |
| | | gccgggagaatccctgcgcatctcgtgcaagggctcgggcttcaacatcgaggattactacat |
| | | ccactgggtgcggcagatgccgggaaaggggttggaatggatgggacgcattgacccgga |
| | | aaatgatgaaaccaaatacgggccaatcttccaaggccacgtgaccattagcgctgacacttc |
| | | catcaacaccgtgtaccttcagtggtcctcactgaaggcgtcggacactgccatgtactactgt |
| | | gcattcagaggaggggtctactggggacagggcaccaccgtgaccgtgagctccggctcgc |
| | | atcaccatcatcaccaccatcac |
| CAR4 - | SEQ ID | malpvtalllplalllhaarpdvvmtqsplslpvtlgqpasisckssqslldsdgktylnwlqq |
| Soluble | NO: 1379 | rpgqsprrlislvskldsgvpdrfsgsgsgtdftlkisrveaedvgvyycwqgthfpgtfggg |
| scFv -aa | | tkveikggggsggggsggggsggggseiqlvqsgaevkkpgeslrisckgsgfniedyyi |
| | | hwvrqmpgkglewmgridpendetkygpifqghvtisadtsintvylqwsslkasdtam |
| | | yycafrggvywgqgttvtvssgshhhhhhhh |
| CAR 4 - | SEQ ID | atggccctccctgtcaccgccctgctgcttccgctggctcttctgctccacgccgctcggcccg |
| Full - nt | NO: 1380 | acgtcgtcatgacccaatcccctctctccctgccggtcaccctgggtcagccggcgtcgatctc |
| | | atgcaaaagctcacagtccctgctggattcggacggaaaaacctacttgaactggctccaaca |
| | | gaggccgggtcagtcccctcgcagactgatctcgctggtgagcaagctcgactcgggtgtgc |
| | | cggatcggttctccgggtcaggatcgggcaccgactttacgctcaagatttcgagagtggagg |
| | | ccgaggatgtgggagtgtactattgctggcagggcacgcatttccccgggacctttggaggc |
| | | gggactaaggtggaaatcaagggaggtggcggatcaggcggaggaggcagcggcggag |
| | | gtggatcaggaggcggagggtcagagatccagctggtccaaagcggagcagaggtgaaga |
| | | agccaggcgagtcccttcgcatttcgtgcaaagggagcggcttcaacattgaagattactacat |
| | | ccactgggtgcggcaaatgccaggaaagggtctggaatggatgggacggatcgacccaga |
| | | aaatgatgaaactaagtacggaccgatcttccaaggacacgtcactatctccgcggacacttc |
| | | gatcaacaccgtgtacctccagtggagcagcttgaaagcctccgacaccgctatgtactactgt |
| | | gccttccgcggaggagtctactggggacaggggactactgtgaccgtgtcgtccaccactac |
| | | cccagcaccgaggccacccaccccggctcctaccatcgcctcccagcctctgtccctgcgtc |
| | | cggaggcatgtagacccgcagctggtggggccgtgcatacccggggtcttgacttcgcctgc |
| | | gatatctacatttgggcccctctggctggtacttgcggggtcctgctgctttcactcgtgatcact |
| | | ctttactgtaagcgcggtcggaagaagctgctgtacatctttaagcaacccttcatgaggcctgt |
| | | gcagactactcaagaggaggacggctgttcatgccggttcccagaggaggaggaaggcgg |
| | | ctgcgaactgcgcgtgaaattcagccgcagcgcagatgctccagcctacaagcaggggcag |
| | | aaccagctctacaacgaactcaatcttggtcggagagaggagtacgacgtgctggacaagcg |
| | | gagaggacgggacccagaaatgggcgggaagccgcgcagaaagaatccccaagagggc |
| | | ctgtacaacgagctccaaaaggataagatggcagaagcctatagcgagattggtatgaaagg |
| | | ggaacgcagaagaggcaaaggccacgacggactgtaccagggactcagcaccgccacca |
| | | aggacacctatgacgctcttcacatgcaggccctgccgcctcgg |
| CAR 4 - | SEQ ID | malpvtalllplalllhaarpdvvmtqsplslpvtlgqpasisckssqslldsdgktylnwlq |
| Full - aa | NO: 1381 | qrpgqsprrlislvskldsgvpdrfsgsgsgtdftlkisrveaedvgvyycwqgthfpgtfg |
| | | ggtkveikggggsggggsggggsggggseiqlvqsgaevkkpgeslrisckgsgfniedy |
| | | yihwvrqmpgkglewmgridpendetkygpifqghvtisadtsintvylqwsslkasd |
| | | tamyycafrggvywgqgttvtvsstttpaprpptpaptiasqplslrpeacrpaaggavhtr |
| | | gldfacdiyiwaplagtcgvlllslvitlyckrgrkkllyifkqpfmrpvqttqeedgcscrfp |
| | | eeeeggcelrvkfsrsadapaykqgqnqlynelnlgrreeydvldkrrgrdpemggkprr |
| | | knpqeglynelqkdkmaeayseigmkgerrrgkghdglyqglstatkdtydalhmqalp |
| | | pr |

CAR 5

| | | |
|---|---|---|
| CAR5 | SEQ ID | eiqlvqsgaevkkpgatvkisckgsgfniedyyihwvqqapgkglewmgridpendet |
| scFv | NO: 1382 | kygpifqgrvtitadtstntvymelsslrsedtavyycafrggvywgqgttvtvssggggsg |
| domain | | gggsggggsggggsdvvmtqsplslpvtlgqpasisckssqslldsdgktylnwlqqrpg |
| | | qsprrlislvskldsgvpdrfsgsgsgtdftlkisrveaedvgvyycwqgthfpgtfgggtkv |
| | | eik |
| CAR5 | SEQ ID | gaaatccagctcgtgcagagcggagccgaggtcaagaaaccgggtgctaccgtgaagattt |
| scFv | NO: 1383 | catgcaagggatcgggcttcaacatcgaggattactacatccactgggtgcagcaggcacca |
| domain nt | | ggaaaaggacttgaatggatgggccggatcgacccggaaaatgacgagactaagtacggcc |
| | | ctatcttccaaggacgggtgacgatcaccgcagacactagcaccaacaccgtctatatggaac |
| | | tctcgtccctgaggtccgaagatactgccgtgtactactgtgcgtttcgcggaggtgtgtactgg |
| | | ggacagggtaccaccgtcaccgtgtcatcgggcggtggaggctccggtggaggagggtca |
| | | ggaggcggtggaagcggaggaggcggcagcgacgtggtcatgactcaatcgccgctgtcg |
| | | ctgcccgtcactctgggacaacccgcgtccatcagctgcaaatcctcgcagtcactgcttgact |
| | | ccgatggaaagacctacctcaactggctgcagcaacgcccaggccaatccccaagacgcct |
| | | gatctcgttggtgtcaaagctggactcaggggtgccggaccggttctccgggagcgggtcgg |
| | | gcacggatttcactctcaagatctccagagtggaagccgaggatgtgggagtctactactgct |
| | | ggcagggaacccatttccctggaacttttggcggaggaactaaggtcgagattaaa |
| CAR5 - | SEQ ID | atggccctccctgtcaccgccctgctgcttccgctggctcttctgctccacgccgctcggcccg |
| Soluble | NO: 1384 | aaatccagctcgtgcagagcggagccgaggtcaagaaaccgggtgctaccgtgaagatttca |
| scFv - nt | | tgcaagggatcgggcttcaacatcgaggattactacatccactgggtgcagcaggcaccagg |
| | | aaaaggacttgaatggatgggccggatcgacccggaaaatgacgagactaagtacggccct |
| | | atcttccaaggacgggtgacgatcaccgcagacactagcaccaacaccgtctatatggaactc |
| | | tcgtccctgaggtccgaagatactgccgtgtactactgtgcgtttcgcggaggtgtgtactggg |
| | | gacagggtaccaccgtcaccgtgtcatcgggcggtggaggctccggtggaggagggtcag |
| | | gaggcggtggaagcggaggaggcggcagcgacgtggtcatgactcaatcgccgctgtcgc |
| | | tgcccgtcactctgggacaacccgcgtccatcagctgcaaatcctcgcagtcactgcttgactc |
| | | cgatggaaagacctacctcaactggctgcagcaacgcccaggccaatccccaagacgcctg |
| | | atctcgttggtgtcaaagctggactcaggggtgccggaccggttctccgggagcgggtcggg |
| | | cacggatttcactctcaagatctccagagtggaagccgaggatgtgggagtctactactgctg |
| | | gcagggaacccatttccctggaacttttggcggaggaactaaggtcgagattaaagggagcc |
| | | accatcatcatcaccaccaccac |
| CAR5 - | SEQ ID | malpvtalllplalllhaarpeiqlvqsgaevkkpgatvkisckgsgfniedyyihwvqqap |
| Soluble | NO: 1385 | gkglewmgridpendetkygpifqgrvtitadtstntvymelsslrsedtavyycafrggvy |
| scFv -aa | | wgqgttvtvssggggsggggsggggsggggsdvvmtqsplslpvtlgqpasisckssqsl |
| | | ldsdgktylnwlqqrpgqsprrlislvskldsgvpdrfsgsgsgtdftlkisrveaedvgvyy |
| | | cwqgthfpgtfgggtkveikgshhhhhhhh |
| CAR 5 - | SEQ ID | atggccctccctgtcaccgccctgctgcttccgctggctcttctgctccacgccgctcggcccg |
| Full - nt | NO: 1386 | aaatccagctcgtgcagagcggagccgaggtcaagaaaccgggtgctaccgtgaagatttca |
| | | tgcaagggatcgggcttcaacatcgaggattactacatccactgggtgcagcaggcaccagg |
| | | aaaaggacttgaatggatgggccggatcgacccggaaaatgacgagactaagtacggccct |
| | | atcttccaaggacgggtgacgatcaccgcagacactagcaccaacaccgtctatatggaactc |
| | | tcgtccctgaggtccgaagatactgccgtgtactactgtgcgtttcgcggaggtgtgtactggg |
| | | gacagggtaccaccgtcaccgtgtcatcgggcggtggaggctccggtggaggagggtcag |
| | | gaggcggtggaagcggaggaggcggcagcgacgtggtcatgactcaatcgccgctgtcgc |
| | | tgcccgtcactctgggacaacccgcgtccatcagctgcaaatcctcgcagtcactgcttgactc |
| | | cgatggaaagacctacctcaactggctgcagcaacgcccaggccaatccccaagacgcctg |
| | | atctcgttggtgtcaaagctggactcaggggtgccggaccggttctccgggagcgggtcggg |
| | | cacggatttcactctcaagatctccagagtggaagccgaggatgtgggagtctactactgctg |
| | | gcagggaacccatttccctggaacttttggcggaggaactaaggtcgagattaaaaccactac |
| | | cccagcaccgaggccacccaccccggctcctaccatcgcctcccagcctctgtccctgcgtc |
| | | cggaggcatgtagacccgcagctggtggggccgtgcatacccggggtcttgacttcgcctgc |
| | | gatatctacatttgggcccctctggctggtacttgcggggtcctgctgctttcactcgtgatcact |
| | | ctttactgtaagcgcggtcggaagaagctgctgtacatctttaagcaacccttcatgaggcctgt |
| | | gcagactactcaagaggaggacggctgttcatgccggttcccagaggaggaggaaggcgg |
| | | ctgcgaactgcgcgtgaaattcagccgcagcgcagatgctccagcctacaagcaggggcag |
| | | aaccagctctacaacgaactcaatcaggtcggagagaggagtacgacgtgctggacaagcg |
| | | gagaggacgggacccagaaatgggcgggaagccgcgcagaaagaatccccaagagggc |
| | | ctgtacaacgagctccaaaaggataagatggcagaagcctatagcgagattggtatgaaagg |
| | | ggaacgcagaagaggcaaaggccacgacggactgtaccagggactcagcaccgccacca |
| | | aggacacctatgacgctcttcacatgcaggccctgccgcctcgg |
| CAR 5 - | SEQ ID | malpvtalllplalllhaarpeiqlvqsgaevkkpgatvkisckgsgfniedyyihwvqqap |
| Full - aa | NO: 1387 | gkglewmgridpendetkygpifqgrvtitadtstntvymelsslrsedtavyycafrgg |
| | | vywgqgttvtvssggggsggggsggggsggggsdvvmtqsplslpvtlgqpasisckss |
| | | qslldsdgktylnwlqqrpgqsprrlislvskldsgvpdrfsgsgsgtdftlkisrveaedvg |
| | | vyycwqgthfpgtfgggtkveiktttpaprpptpaptiasqplslrpeacrpaaggavhtrg |
| | | ldfacdiyiwaplagtcgvlllslvitlyckrgrkkllyifkqpfmrpvqttqeedgcscrfpe |
| | | eeeggcelrvkfsrsadapaykqgqnqlynelnlgrreeydvldkrrgrdpemggkprrk |
| | | npqeglynelqkdkmaeayseigmkgerrrgkghdglyqglstatkdtydalhmqalpp |
| | | r |

CAR6

| | | |
|---|---|---|
| CAR6 | SEQ ID | eiqlvqsgaevkkpgeslrisckgsgfniedyyihwvrqmpgkglewmgridpendetk |
| scFv | NO: 1388 | ygpifqghvtisadtsintvylqwsslkasdtamyycafrggvywgqgttvtvssggggsg |
| domain | | gggsggggsggggsdvvmtqspdslayslgeratinckssqslldsdgktylnwlqqkpg |
| | | qppkrlislvskldsgvpdrfsgsgsgtdftltisslqaedvavyycwqgthfpgtfgggtkv |
| | | eik |
| CAR6 | SEQ ID | gaaatccagctggtgcagtcaggcgccgaggtcaagaagccgggagagtcgctgagaatct |
| scFv | NO: 1389 | cgtgcaagggctcggggacaacatcgaggactactacattcactgggtcaggcagatgccg |
| domain nt | | ggaaagggactggaatggatgggccggatcgacccagaaaatgacgaaaccaaatacggg |
| | | ccgatttttcaaggccacgtgactatcagcgcagacacgagcatcaacactgtctacctccagt |
| | | ggtcctcgcttaaggccagcgataccgctatgtactactgcgcattcagaggcggggtgtact |
| | | ggggacaaggaaccactgtgaccgtgagcagcggaggtggcggctcgggaggaggtggg |
| | | agcggaggaggaggttccggcggtggaggatcagatgtcgtgatgacccagtccccggact |
| | | ccctcgctgtctcactgggcgagcgcgcgaccatcaactgcaaatcgagccagtcgctgttg |
| | | gactccgatggaaagacttatctgaattggctgcaacagaaaccaggacaacctcccaagcg |
| | | gctcatctcgcttgtgtcaaaactcgattcgggagtgccagaccgcttctcggggtccgggag |
| | | cggaactgactttactttgaccatttcctcactgcaagcggaggatgtggccgtgtattactgttg |
| | | gcagggcacgcatttccctggaaccttcggtggcggaactaaggtggaaatcaag |
| CAR6 - | SEQ ID | atggccctccctgtcaccgccctgctgcttccgctggctcttctgctccacgccgctcggcccg |
| Soluble | NO: 1390 | aaatccagctggtgcagtcaggcgccgaggtcaagaagccgggagagtcgctgagaatctc |
| scFv - nt | | gtgcaagggctcggggttcaacatcgaggactactacattcactgggtcaggcagatgccgg |
| | | gaaagggactggaatggatgggccggatcgacccagaaaatgacgaaaccaaatacgggc |
| | | cgatttttcaaggccacgtgactatcagcgcagacacgagcatcaacactgtctacctccagtg |
| | | gtcctcgcttaaggccagcgataccgctatgtactactgcgcattcagaggcggggtgtactg |
| | | gggacaaggaaccactgtgaccgtgagcagcggaggtggcggctcgggaggaggtggga |
| | | gcggaggaggaggttccggcggtggaggatcagatgtcgtgatgacccagtccccggactc |
| | | cctcgctgtctcactgggcgagcgcgcgaccatcaactgcaaatcgagccagtcgctgttgg |
| | | actccgatggaaagacttatctgaattggctgcaacagaaaccaggacaacctcccaagcgg |
| | | ctcatctcgcttgtgtcaaaactcgattcgggagtgccagaccgcttctcggggtccgggagc |
| | | ggaactgactttactttgaccatttcctcactgcaagcggaggatgtggccgtgtattactgttgg |
| | | cagggcacgcatttccctggaaccttcggtggcggaactaaggtggaaatcaagggatcaca |
| | | ccaccatcatcaccatcaccaccat |
| CAR6 - | SEQ ID | malpvtalllplalllhaarpeiqlvqsgaevkkpgeslrisckgsgfniedyyihwvrqmp |
| Soluble | NO: 1391 | gkglewmgridpendetkygpifqghvtisadtsintvylqwsslkasdtamyycafrgg |
| scFv - aa | | vywgqgttvtvssggggsggggsggggsggggsdvvmtqspdslayslgeratinckss |
| | | qslldsdgktylnwlqqkpgqppkrlislvskldsgvpdrfsgsgsgtdftltisslqaedvav |
| | | yycwqgthfpgtfgggtkveikgshhhhhhhhh |
| CAR6 - | SEQ ID | atggccctccctgtcaccgccctgctgcttccgctggctcttctgctccacgccgctcggcccg |
| Full - nt | NO: 1392 | agattcagctcgtgcaatcgggagcggaagtcaagaagccaggagagtccttgcggatctca |
| | | tgcaagggtagcggctttaacatcgaggattactacatccactgggtgaggcagatgccggg |
| | | gaagggactcgaatggatgggacggatcgacccagaaaacgacgaaactaagtacggtcc |
| | | gatcttccaaggccatgtgactattagcgccgatacttcaatcaataccgtgtatctgcaatggtc |
| | | ctcattgaaagcctcagataccgcgatgtactactgtgctttcagaggaggggtctactgggga |
| | | cagggaactaccgtgactgtctcgtccggcggaggcgggtcaggaggtggcggcagcgga |
| | | ggaggagggtccggcggaggtgggtccgacgtcgtgatgacccagagccctgacagcctg |
| | | gcagtgagcctgggcgaaagagctaccattaactgcaaatcgtcgcagagcctgctggactc |
| | | ggacggaaaaacgtacctcaattggctgcagcaaaagcctggccagccaccgaagcgcctt |
| | | atctcactggtgtcgaagctggattcgggagtgcccgatcgcttctccggctcgggatcgggt |
| | | actgacttcaccctcactatctcctcgcttcaagcagaggacgtggccgtctactactgctggca |
| | | gggaacccactttccgggaaccttcggcggagggacgaaagtggagatcaagaccactacc |
| | | ccagcaccgaggccacccaccccggctcctaccatcgcctcccagcctctgtccctgcgtcc |
| | | ggaggcatgtagacccgcagctggtggggccgtgcatacccggggtcttgacttcgcctgcg |
| | | atatctacatttgggcccctctggctggtacttgcggggtcctgctgctttcactcgtgatcactct |
| | | ttactgtaagcgcggtcggaagaagctgctgtacatctttaagcaacccttcatgaggcctgtg |
| | | cagactactcaagaggaggacggctgttcatgccggttcccagaggaggaggaaggcggct |
| | | gcgaactgcgcgtgaaattcagccgcagcgcagatgctccagcctacaagcaggggcaga |
| | | accagctctacaacgaactcaatcttggtcggagagaggagtacgacgtgctggacaagcgg |
| | | agaggacgggacccagaaatgggcgggaagccgcgcagaaagaatccccaagagggcct |
| | | gtacaacgagctccaaaaggataagatggcagaagcctatagcgagattggtatgaaaggg |
| | | gaacgcagaagaggcaaaggccacgacggactgtaccagggactcagcaccgccaccaa |
| | | ggacacctatgacgctcttcacatgcaggccctgccgcctcgg |
| CAR6 - | SEQ ID | malpvtalllplalllhaarpeiqlvqsgaevkkpgeslrisckgsgfniedyyihwvrqmp |
| Full - aa | NO: 1393 | gkglewmgridpendetkygpifqghvtisadtsintvylqwsslkasdtamyycafrg |
| | | gvywgqgttvtvssggggsggggsggggsggggsdvvmtqspdslayslgeratincks |
| | | sqslldsdgktylnwlqqkpgqppkrlislvskldsgvpdrfsgsgsgtdftltisslqaedv |
| | | avyycwqgthfpgtfgggtkveiktttpaprpptpaptiasqplslrpeacrpaaggavhtr |
| | | gldfacdiyiwaplagtcgvlllslvitlyckrgrkkllyifkqpfmrpvqttqeedgcscrfp |
| | | eeeeggcelrvkfsrsadapaykqgqnqlynelnlgrreeydvldkrrgrdpemggkprr |
| | | knpqeglynelqkdkmaeayseigmkgerrrgkghdglyqglstatkdtydalhmqalp |
| | | pr |

CAR 7

| | | |
|---|---|---|
| CAR7 | SEQ ID | dvvmtqspdslayslgeratinckssqslldsdgktylnwlqqkpgqppkrlislvskldsg |
| scFv | NO: 1394 | vpdrfsgsgsgtdftltisslqaedvavyycwqgthfpgtfgggtkveikggggsggggsg |
| domain | | gggsggggseiqlvqsgaevkkpgeslrisckgsgfniedyyihwvrqmpgkglewmg |
| | | ridpendetkygpifqghvtisadtsintvylqwsslkasdtamyycafrggvywgqgttv |
| | | tvss |
| CAR7 | SEQ ID | gacgtggtgatgacccaatcgccagattccctggcagtgtccctgggcgaacgcgccactatt |
| scFv | NO: 1395 | aactgcaaatcgtcacagtccttgcttgattccgacggaaagacctacctcaattggctccagc |
| domain nt | | agaagccaggacaaccgccaaagagactgatctccctggtgtcaaagctggactcgggagt |
| | | gcctgatcggttctcgggtagcgggagcggcaccgacttcactctgaccatctcgtcactcca |
| | | ggctgaggacgtggccgtgtattactgttggcagggtactcactttccgggcactttcggaggc |
| | | ggcaccaaggtggagattaaaggaggaggcggaagcggaggtggaggatcgggaggtgg |
| | | tgggagcggcggaggagggagcgagatccagctcgtccaatcgggagcggaagtgaaga |
| | | agcccggagagtcacttagaatctcatgcaaggggtcgggcttcaacatcgaggattactaca |
| | | tccattgggtccgccagatgcctggtaaaggactggaatggatggggaggattgacccggaa |
| | | aacgacgaaactaagtacggaccgatctttcaagggcacgtgactatctccgctgatacctca |
| | | atcaatactgtctacctccagtggtcctcgctgaaagcaagcgacaccgcgatgtactactgcg |
| | | ccttccggggaggagtgtactggggccaaggcaccacggtcacggtcagctcc |
| CAR7 - | SEQ ID | atggccctccctgtcaccgccctgctgcttccgctggctcttctgctccacgccgctcggcccg |
| Soluble | NO: 1396 | acgtggtgatgacccaatcgccagattccctggcagtgtccctgggcgaacgcgccactatta |
| scFv - nt | | actgcaaatcgtcacagtccttgcttgattccgacggaaagacctacctcaattggctccagca |
| | | gaagccaggacaaccgccaaagagactgatctccctggtgtcaaagctggactcgggagtg |
| | | cctgatcggttctcgggtagcgggagcggcaccgacttcactctgaccatctcgtcactccag |
| | | gctgaggacgtggccgtgtattactgttggcagggtactcactttccgggcactttcggaggcg |
| | | gcaccaaggtggagattaaaggaggaggcggaagcggaggtggaggatcgggaggtggt |
| | | gggagcggcggaggagggagcgagatccagctcgtccaatcgggagcggaagtgaagaa |
| | | gcccggagagtcacttagaatctcatgcaaggggtcgggcttcaacatcgaggattactacat |
| | | ccattgggtccgccagatgcctggtaaaggactggaatggatggggaggattgacccggaa |
| | | aacgacgaaactaagtacggaccgatctttcaagggcacgtgactatctccgctgatacctca |
| | | atcaatactgtctacctccagtggtcctcgctgaaagcaagcgacaccgcgatgtactactgcg |
| | | ccttccggggaggagtgtactggggccaaggcaccacggtcacggtcagctccggctccca |
| | | tcaccaccaccatcaccatcatcac |
| CAR7 - | SEQ ID | malpvtalllplalllhaarpdvvmtqspdslayslgeratinckssqslldsdgktylnwlqq |
| Soluble | NO: 1397 | kpgqppkrlislvskldsgvpdrfsgsgsgtdftltisslqaedvavyycwqgthfpgtfggg |
| scFv - aa | | tkveikggggsggggsggggsggggseiqlvqsgaevkkpgeslrisckgsgfniedyyi |
| | | hwvrqmpgkglewmgridpendetkygpifqghvtisadtsintvylqwsslkasdtam |
| | | yycafrggvywgqgttvtvssgshhhhhhhhh |
| CAR 7 | SEQ ID | atggccctccctgtcaccgccctgctgcttccgctggctcttctgctccacgccgctcggcccg |
| Full - nt | NO: 1398 | acgtggtgatgactcagtcgcctgactcgctggctgtgtcccttggagagcgggccactatca |
| | | attgcaagtcatcccagtcgctgctggattccgacgggaaaacctacctcaattggctgcagca |
| | | aaaaccgggacagcctccaaagcggctcatcagcctggtgtccaagttggacagcggcgtg |
| | | ccagaccgcttctccggttcgggaagcggtactgatttcacgctgaccatctcatccctccaag |
| | | cggaggatgtggcagtctactactgttggcagggcacgcattttccgggcacttttggaggag |
| | | ggaccaaggtcgaaatcaagggaggaggtggctcgggcggaggaggctcgggaggagg |
| | | aggatcaggaggcggtggaagcgagattcaactggtccagagcggcgcagaagtcaagaa |
| | | gccgggtgaatcgctcagaatctcgtgcaaaggatcgggattcaacatcgaggactactacat |
| | | tcactgggtcagacaaatgccgggcaaagggctggaatggatggggaggatcgaccccga |
| | | aaacgatgaaaccaagtacggaccaatcttccaagggcacgtgaccatttcggcggacacct |
| | | caatcaacactgtgtacctccagtggagctcacttaaggccagcgataccgccatgtactattg |
| | | cgctttccgcggaggggtgtactggggacagggcactactgtgaccgtgtcatccaccactac |
| | | cccagcaccgaggccacccaccccggctcctaccatcgcctcccagcctctgtccctgcgtc |
| | | cggaggcatgtagacccgcagctggtggggccgtgcatacccggggtcttgacttcgcctgc |
| | | gatatctacatttgggcccctctggctggtacttgcggggtcctgctgctttcactcgtgatcact |
| | | ctttactgtaagcgcggtcggaagaagctgctgtacatctttaagcaacccttcatgaggcctgt |
| | | gcagactactcaagaggaggacggctgttcatgccggttcccagaggaggaggaaggcgg |
| | | ctgcgaactgcgcgtgaaattcagccgcagcgcagatgctccagcctacaagcaggggcag |
| | | aaccagctctacaacgaactcaatcttggtcggagagaggagtacgacgtgctggacaagcg |
| | | gagaggacgggacccagaaatgggcgggaagccgcgcagaaagaatccccaagagggc |
| | | ctgtacaacgagctccaaaaggataagatggcagaagcctatagcgagattggtatgaaagg |
| | | ggaacgcagaagaggcaaaggccacgacggactgtaccagggactcagcaccgccacca |
| | | aggacacctatgacgctcttcacatgcaggccctgccgcctcgg |
| CAR 7 | SEQ ID | malpvtalllplalllhaarpdvvmtqspdslayslgeratinckssqslldsdgktylnwlq |
| Full - aa | NO: 1399 | qkpgqppkrlislvskldsgvpdrfsgsgsgtdftltisslqaedvavyycwqgthfpgtfg |
| | | ggtkveikggggsggggsggggsggggseiqlvqsgaevkkpgeslrisckgsgfniedy |
| | | yihwvrqmpgkglewmgridpendetkygpifqghvtisadtsintvylqwsslkasd |
| | | tamyycafrggvywgqgttvtvsstttpaprpptpaptiasqplslrpeacrpaaggavhtr |
| | | gldfacdiyiwaplagtcgvlllslvitlyckrgrkkllyifkqpfmrpvqttqeedgcscrfp |
| | | eeeeggcelrvkfsrsadapaykqgqnqlynelnlgrreeydvldkrrgrdpemggkprr |
| | | knpqeglynelqkdkmaeayseigmkgerrrgkghdglyqglstatkdtydalhmqalp |
| | | pr |

CAR8

| | | |
|---|---|---|
| CAR8 | SEQ ID | dvvmtqsplslpvtlgqpasisckssqslldsdgktylnwlqqrpgqsprrlislvskldsgv |
| scFv | NO: 1400 | pdrfsgsgsgtdftlkisrveaedvgvyycwqgthfpgtfgggtkveikggggsggggsg |
| domain | | gggsggggseiqlvqsgaevkkpgatvkisckgsgfniedyyihwvqqapgkglewm |
| | | gridpendetkygpifqgrvtitadtstntvymelsslrsedtavyycafrggvywgqgttvt |
| | | vss |
| CAR8 | SEQ ID | gatgtggtcatgacgcagtcaccactgtccctccccgtgacccttggacagccagcgtcgatt |
| scFv | NO: 1401 | agctgcaagtcatcccaatccctgctcgattcggatggaaagacctatctcaactggctgcagc |
| domain nt | | aaagacccggtcagagccctaggagactcatctcgttggtgtcaaagctggacagcggagtg |
| | | ccggaccggttttccggttcgggatcggggacggacttcactctgaagatttcacgggtggaa |
| | | gctgaggatgtgggagtgtactactgctggcagggaacccatttccctggcacttttggcgga |
| | | ggaactaaggtcgaaatcaagggaggaggtggctcgggaggaggcggatcgggcggagg |
| | | cgggagcggcggaggagggtccgaaatccaacttgtccagtcaggagccgaagtgaagaa |
| | | accgggagccaccgtcaaaatcagctgtaagggatcgggattcaatatcgaggactactacat |
| | | ccactgggtgcagcaagctccgggcaaaggactggagtggatggggcgcatcgacccaga |
| | | gaacgacgaaaccaaatacggcccgatcttccaagggcgggtgaccatcaccgcggacac |
| | | ctcaactaacactgtgtacatggagctgagctccctgcgctccgaagatactgcagtctactact |
| | | gcgccttccgcggtggtgtgtactggggacagggcaccactgtgactgtcagctcg |
| CAR8 - | SEQ ID | atggccctccctgtcaccgccctgctgcttccgctggctcttctgctccacgccgctcggcccg |
| Soluble | NO: 1402 | atgtggtcatgacgcagtcaccactgtccctccccgtgacccttggacagccagcgtcgatta |
| scFv - nt | | gctgcaagtcatcccaatccctgctcgattcggatggaaagacctatctcaactggctgcagca |
| | | aagacccggtcagagccctaggagactcatctcgttggtgtcaaagctggacagcggagtgc |
| | | cggaccggttttccggttcgggatcggggacggacttcactctgaagatttcacgggtggaag |
| | | ctgaggatgtgggagtgtactactgctggcagggaacccatttccctggcacttttggcggag |
| | | gaactaaggtcgaaatcaagggaggaggtggctcgggaggaggcggatcgggcggaggc |
| | | gggagcggcggaggagggtccgaaatccaacttgtccagtcaggagccgaagtgaagaaa |
| | | ccgggagccaccgtcaaaatcagctgtaagggatcgggattcaatatcgaggactactacatc |
| | | cactgggtgcagcaagctccgggcaaaggactggagtggatggggcgcatcgacccagag |
| | | aacgacgaaaccaaatacggcccgatcttccaagggcgggtgaccatcaccgcggacacct |
| | | caactaacactgtgtacatggagctgagctccctgcgctccgaagatactgcagtctactactg |
| | | cgccttccgcggtggtgtgtactggggacagggcaccactgtgactgtcagctcggggtccc |
| | | accatcatcaccaccaccatcac |
| CAR8 - | SEQ ID | malpvtalllplalllhaarpdvvmtqsplslpvtlgqpasisckssqslldsdgktylnwlqq |
| Soluble | NO: 1403 | rpgqsprrlislvskldsgvpdrfsgsgsgtdftlkisrveaedvgvyycwqgthfpgtfggg |
| scFv - aa | | tkveikggggsggggsggggsggggseiqlvqsgaevkkpgatvkisckgsgfniedyyi |
| | | hwvqqapgkglewmgridpendetkygpifqgrvtitadtstntvymelsslrsedtavy |
| | | ycafrggvywgqgttvtvssgshhhhhhhh |
| CAR 8 - | SEQ ID | atggccctccctgtcaccgccctgctgcttccgctggctcttctgctccacgccgctcggcccg |
| Full - nt | NO: 1404 | atgtggtcatgacgcagtcaccactgtccctccccgtgacccttggacagccagcgtcgatta |
| | | gctgcaagtcatcccaatccctgctcgattcggatggaaagacctatctcaactggctgcagca |
| | | aagacccggtcagagccctaggagactcatctcgttggtgtcaaagctggacagcggagtgc |
| | | cggaccggttttccggttcgggatcggggacggacttcactctgaagatttcacgggtggaag |
| | | ctgaggatgtgggagtgtactactgctggcagggaacccatttccctggcacttttggcggag |
| | | gaactaaggtcgaaatcaagggaggaggtggctcgggaggaggcggatcgggcggaggc |
| | | gggagcggcggaggagggtccgaaatccaacttgtccagtcaggagccgaagtgaagaaa |
| | | ccgggagccaccgtcaaaatcagctgtaagggatcgggattcaatatcgaggactactacatc |
| | | cactgggtgcagcaagctccgggcaaaggactggagtggatggggcgcatcgacccagag |
| | | aacgacgaaaccaaatacggcccgatcttccaagggcgggtgaccatcaccgcggacacct |
| | | caactaacactgtgtacatggagctgagctccctgcgctccgaagatactgcagtctactactg |
| | | cgccttccgcggtggtgtgtactggggacagggcaccactgtgactgtcagctcgaccactac |
| | | cccagcaccgaggccacccaccccggctcctaccatcgcctcccagcctctgtccctgcgtc |
| | | cggaggcatgtagacccgcagctggtggggccgtgcatacccggggtcttgacttcgcctgc |
| | | gatatctacatttgggcccctctggctggtacttgcggggtcctgctgctttcactcgtgatcact |
| | | ctttactgtaagcgcggtcggaagaagctgctgtacatctttaagcaacccttcatgaggcctgt |
| | | gcagactactcaagaggaggacggctgttcatgccggttcccagaggaggaggaaggcgg |
| | | ctgcgaactgcgcgtgaaattcagccgcagcgcagatgctccagcctacaagcaggggcag |
| | | aaccagctctacaacgaactcaatcttggtcggagagaggagtacgacgtgctggacaagcg |
| | | gagaggacgggacccagaaatgggcgggaagccgcgcagaaagaatccccaagagggc |
| | | ctgtacaacgagctccaaaaggataagatggcagaagcctatagcgagattggtatgaaagg |
| | | ggaacgcagaagaggcaaaggccacgacggactgtaccagggactcagcaccgccacca |
| | | aggacacctatgacgctcttcacatgcaggccctgccgcctcgg |
| CAR 8 - | SEQ ID | malpvtalllplalllhaarpdvvmtqsplslpvtlgqpasisckssqslldsdgktylnwlq |
| Full - aa | NO: 1405 | qrpgqsprrlislvskldsgvpdrfsgsgsgtdftlkisrveaedvgvyycwqgthfpgtfg |
| | | ggtkveikggggsggggsggggsggggseiqlvqsgaevkkpgatvkisckgsgfnied |
| | | yyihwvqqapgkglewmgridpendetkygpifqgrvtitadtstntvymelsslrsed |
| | | tavyycafrggvywgqgttvtvsstttpaprpptpaptiasqplslrpeacrpaaggavhtrg |
| | | ldfacdiyiwaplagtcgvlllslvitlyckrgrkkllyifkqpfmrpvqttqeedgcscrfpe |
| | | eeeggcelrvkfsrsadapaykqgqnqlynelnlgrreeydvldkrrgrdpemggkprrk |
| | | npqeglynelqkdkmaeayseigmkgerrrgkghdglyqglstatkdtydalhmqalpp |
| | | r |

CAR 9 Mouse anti-EGFRvIII clone 3C10

| | | |
|---|---|---|
| CAR9 | SEQ ID | eiqlqqsgaelvkpgasvklsctgsgfniedyyihwvkqrteqglewigridpendetkyg |
| scFv | NO: 1406 | pifqgratitadtssntvylqlssltsedtavyycafrggvywgpgttltvssggggsggggsg |
| domain | | gggshmdvvmtqspltlsvaigqsasisckssqslldsdgktylnwllqrpgqspkrlislv |
| | | skldsgvpdrftgsgsgtdftlrisrveaedlgiyycwqgthfpgtfgggtkleik |
| CAR9 | SEQ ID | gagatccagctccaacagagcggagccgaactggtcaaaccgggagcgtcggtgaagttgt |
| scFv | NO: 1407 | catgcactggatcgggcttcaacatcgaggattactacatccactgggtcaagcaacgcaccg |
| domain nt | | agcaggggctggaatggatcggacggatcgaccccgaaaacgatgaaaccaagtacgggc |
| | | ctatcttccaaggacgggccaccattacggctgacacgtcaagcaataccgtctacctccagct |
| | | ttccagcctgacctccgaggacactgccgtgtactactgcgccttcagaggaggcgtgtactg |
| | | gggaccaggaaccactttgaccgtgtccagcggaggcggtggatcaggaggaggaggctc |
| | | aggcggtggcggctcgcacatggacgtggtcatgactcagtccccgctgaccctgtcggtgg |
| | | caattggacagagcgcatccatctcgtgcaagagctcacagtcgctgctggattccgacggaa |
| | | agacttatctgaactggctgctccaaagaccagggcaatcaccgaaacgccttatctccctggt |
| | | gtcgaaactcgactcgggtgtgccggatcggtttaccggtagcgggtccggcacggacttca |
| | | ctctccgcatttcgagggtggaagcggaggatctcgggatctactactgttggcagggaaccc |
| | | acttccctgggacttttggaggcggaactaagctggaaatcaag |
| CAR9 - | SEQ ID | atggccctccctgtcaccgccctgctgcttccgctggctcttctgctccacgccgctcggcccg |
| Soluble | NO: 1408 | agatccagctccaacagagcggagccgaactggtcaaaccgggagcgtcggtgaagttgtc |
| scFv - nt | | atgcactggatcgggcttcaac atcgaggattactacatccactgggtcaagcaacgcaccga |
| | | gcaggggctggaatggatcggacggatcgaccccgaaaacgatgaaaccaagtacgggcc |
| | | tatcttccaaggacgggccaccattacggctgacacgtcaagcaataccgtctacctccagctt |
| | | tccagcctgacctccgaggacactgccgtgtactactgcgccttcagaggaggcgtgtactgg |
| | | ggaccaggaaccactttgaccgtgtccagcggaggcggtggatcaggaggaggaggctca |
| | | ggcggtggcggctcgcacatggacgtggtcatgactcagtccccgctgaccctgtcggtggc |
| | | aattggacagagcgcatccatctcgtgcaagagctcacagtcgctgctggattccgacggaaa |
| | | gacttatctgaactggctgctccaaagaccagggcaatcaccgaaacgccttatctccctggtg |
| | | tcgaaactcgactcgggtgtgccggatcggtttaccggtagcgggtccggcacggacttcact |
| | | ctccgcatttcgagggtggaagcggaggatctcgggatctactactgttggcagggaaccca |
| | | cttccctgggacttttggaggcggaactaagctggaaatcaagggtagccatcaccatcacca |
| | | ccaccatcat |
| CAR9 - | SEQ ID | malpvtalllplalllhaarpeiqlqqsgaelvkpgasvklsctgsgfniedyyihwvkqrte |
| Soluble | NO: 1409 | qglewigridpendetkygpifqgratitadts sntvylqlssltsedtavyycafrggvywg |
| scFv - aa | | pgttltvssggggsggggsggggshmdvvmtqspltlsvaigqsasisckssqslldsdgkt |
| | | ylnwllqrpgqspkrlislvskldsgvpdrftgsgsgtdftlrisrveaedlgiyycwqgthfp |
| | | gtfgggtkleikgshhhhhhhh |
| CAR 9 - | SEQ ID | atggccctccctgtcaccgccctgctgcttccgctggctcttctgctccacgccgctcggcccg |
| Full - nt | NO: 1410 | agatccagctccaacagagcggagccgaactggtcaaaccgggagcgtcggtgaagttgtc |
| | | atgcactggatcgggcttcaac atcgaggattactacatccactgggtcaagcaacgcaccga |
| | | gcaggggctggaatggatcggacggatcgaccccgaaaacgatgaaaccaagtacgggcc |
| | | tatcttccaaggacgggccaccattacggctgacacgtcaagcaataccgtctacctccagctt |
| | | tccagcctgacctccgaggacactgccgtgtactactgcgccttcagaggaggcgtgtactgg |
| | | ggaccaggaaccactttgaccgtgtccagcggaggcggtggatcaggaggaggaggctca |
| | | ggcggtggcggctcgcacatggacgtggtcatgactcagtccccgctgaccctgtcggtggc |
| | | aattggacagagcgcatccatctcgtgcaagagctcacagtcgctgctggattccgacggaaa |
| | | gacttatctgaactggctgctccaaagaccagggcaatcaccgaaacgccttatctccctggtg |
| | | tcgaaactcgactcgggtgtgccggatcggtttaccggtagcgggtccggcacggacttcact |
| | | ctccgcatttcgagggtggaagcggaggatctcgggatctactactgttggcagggaaccca |
| | | cttccctgggacttttggaggcggaactaagctggaaatcaagaccactaccccagcaccga |
| | | ggccacccaccccggctcctaccatcgcctcccagcctctgtccctgcgtccggaggcatgta |
| | | gacccgcagctggtggggccgtgcatacccggggtcttgacttcgcctgcgatatctacatttg |
| | | ggcccctctggctggtacttgcggggtcctgctgctttcactcgtgatcactctttactgtaagcg |
| | | cggtcggaagaagctgctgtacatctttaagcaacccttcatgaggcctgtgcagactactcaa |
| | | gaggaggacggctgttcatgccggttcccagaggaggaggaaggcggctgcgaactgcgc |
| | | gtgaaattcagccgcagcgcagatgctccagcctacaagcaggggcagaaccagctctaca |
| | | acgaactcaatcttggtcggagagaggagtacgacgtgctggacaagcggagaggacggg |
| | | acccagaaatgggcgggaagccgcgcagaaagaatccccaagagggcctgtacaacgag |
| | | ctccaaaaggataagatggcagaagcctatagcgagattggtatgaaaggggaacgcagaa |
| | | gaggcaaaggccacgacggactgtaccagggactcagcaccgccaccaaggacacctatg |
| | | acgctcttcacatgcaggccctgccgcctcgg |
| CAR 9 - | SEQ ID | malpvtalllplalllhaarpeiqlqqsgaelvkpgasvklsctgsgfniedyyihwvkqrte |
| Full - aa | NO: 1411 | qglewigridpendetkygpifqgratitadtssntvylqlssltsedtavyycafrggvyw |
| | | gpgttltvssggggsggggsggggshmdvvmtqspltlsvaigqsasisckssqslldsdg |
| | | ktylnwllqrpgqspkrlislvskldsgvpdrftgsgsgtdftlrisrveaedlgiyycwqgt |
| | | hfpgtfgggtkleiktttpaprpptpaptiasqplslrpeacrpaaggavhtrgldfacdiyiw |
| | | aplagtcgvlllslvitlyckrgrkkllyifkqpfmrpvqttqeedgcscrfpeeeeggcelry |
| | | kfsrsadapaykqgqnqlynelnlgrreeydvldkrrgrdpemggkprrknpqeglynel |
| | | qkdkmaeayseigmkgerrrgkghdglyqglstatkdtydalhmqalppr |

CAR10 Anti-EGFRvIII clone 139

| | | |
|---|---|---|
| CAR10 | SEQ ID | diqmtqspsslsasvgdrvtitcrasqgirnnlawyqqkpgkapkrliyaasnlqsgvpsrft |
| scFv | NO: 1412 | gsgsgteftlivsslqpedfatyyclqhhsypltsgggtkveikrtgstsgsgkpgsgegsev |
| domain | | qvlesggglvqpggslrlscaasgftfssyamswvrqapgkglewvsaisgsggstnyads |
| | | vkgrftisrdnskntlylqmnslraedtavyycagssgwseywgqgtivtvss |
| CAR9 | SEQ ID | gatatccaaatgactcagagcccttcatccctgagcgccagcgtcggagacagggtgaccat |
| scFv | NO: 1413 | cacgtgccgggcatcccaaggcattagaaataacttggcgtggtatcagcaaaaaccaggaa |
| domain nt | | aggccccgaagcgcctgatctacgcggcctccaaccttcagtcaggagtgccctcgcgcttc |
| | | accgggagcggtagcggaactgagtttacccttatcgtgtcgtccctgcagccagaggacttc |
| | | gcgacctactactgcctccagcatcactcgtacccgttgacttcgggaggcggaaccaaggtc |
| | | gaaatcaaacgcactggctcgacgtcagggtccggtaaaccgggatcgggagaaggatcg |
| | | gaagtccaagtgctggagagcggaggcggactcgtgcaacctggcgggtcgctgcggctc |
| | | agctgtgccgcgtcgggttttactttcagctcgtacgctatgtcatgggtgcggcaggctccgg |
| | | gaaaggggctggaatgggtgtccgctatttccggctcgggtggaagcaccaattacgccgac |
| | | tccgtgaagggacgcttcaccatctcacgggataactccaagaatactctgtacctccagatga |
| | | actcgctgagagccgaggacaccgcagtgtactactgcgcagggtcaagcggctggtccga |
| | | atactggggacagggcaccctcgtcactgtcagctcc |
| CAR10 - | SEQ ID | atggccctccctgtcaccgccctgctgcttccgctggctcttctgctccacgccgctcggcccg |
| Soluble | NO: 1414 | atatccaaatgactcagagcccttcatccctgagcgccagcgtcggagacagggtgaccatc |
| scFv - nt | | acgtgccgggcatcccaaggcattagaaataacttggcgtggtatcagcaaaaaccaggaaa |
| | | ggccccgaagcgcctgatctacgcggcctccaaccttcagtcaggagtgccctcgcgcttca |
| | | ccgggagcggtagcggaactgagtttacccttatcgtgtcgtccctgcagccagaggacttcg |
| | | cgacctactactgcctccagcatcactcgtacccgttgacttcgggaggcggaaccaaggtcg |
| | | aaatcaaacgcactggctcgacgtcagggtccggtaaaccgggatcgggagaaggatcgga |
| | | agtccaagtgctggagagcggaggcggactcgtgcaacctggcgggtcgctgcggctcag |
| | | ctgtgccgcgtcgggttttactttcagctcgtacgctatgtcatgggtgcggcaggctccggga |
| | | aaggggctggaatgggtgtccgctatttccggctcgggtggaagcaccaattacgccgactc |
| | | cgtgaagggacgcttcaccatctcacgggataactccaagaatactctgtacctccagatgaa |
| | | ctcgctgagagccgaggacaccgcagtgtactactgcgcagggtcaagcggctggtccgaa |
| | | tactggggacagggcaccctcgtcactgtcagctcccatcaccatcaccaccaccatcac |
| CAR10 - | SEQ ID | malpvtalllplalllhaarpdiqmtqspsslsasvgdrvtitcrasqgirnnlawyqqkpgk |
| Soluble | NO: 1415 | apkrliyaasnlqsgvpsrftgsgsgteftlivsslqpedfatyyclqhhsypltsgggtkveik |
| scFv - aa | | rtgstsgsgkpgsgegsevqvlesggglvqpggslrlscaasgftfssyamswvrqapgkg |
| | | lewvsaisgsggstnyadsvkgrftisrdnskntlylqmnslraedtavyycagssgwsey |
| | | wgqgtivtvsshhhhhhhh |
| CAR 10 | SEQ ID | atggccctccctgtcaccgccctgctgcttccgctggctcttctgctccacgccgctcggcccg |
| Full - nt | NO: 1416 | atatccaaatgactcagagcccttcatccctgagcgccagcgtcggagacagggtgaccatc |
| | | acgtgccgggcatcccaaggcattagaaataacttggcgtggtatcagcaaaaaccaggaaa |
| | | ggccccgaagcgcctgatctacgcggcctccaaccttcagtcaggagtgccctcgcgcttca |
| | | ccgggagcggtagcggaactgagtttacccttatcgtgtcgtccctgcagccagaggacttcg |
| | | cgacctactactgcctccagcatcactcgtacccgttgacttcgggaggcggaaccaaggtcg |
| | | aaatcaaacgcactggctcgacgtcagggtccggtaaaccgggatcgggagaaggatcgga |
| | | agtccaagtgctggagagcggaggcggactcgtgcaacctggcgggtcgctgcggctcag |
| | | ctgtgccgcgtcgggttttactttcagctcgtacgctatgtcatgggtgcggcaggctccggga |
| | | aaggggctggaatgggtgtccgctatttccggctcgggtggaagcaccaattacgccgactc |
| | | cgtgaagggacgcttcaccatctcacgggataactccaagaatactctgtacctccagatgaa |
| | | ctcgctgagagccgaggacaccgcagtgtactactgcgcagggtcaagcggctggtccgaa |
| | | tactggggacagggcaccctcgtcactgtcagctccaccactaccccagcaccgaggccac |
| | | ccaccccggctcctaccatcgcctcccagcctctgtccctgcgtccggaggcatgtagacccg |
| | | cagctggtggggccgtgcatacccggggtcttgacttcgcctgcgatatctacatttgggcccc |
| | | tctggctggtacttgcggggtcctgctgctttcactcgtgatcactctttactgtaagcgcggtcg |
| | | gaagaagctgctgtacatctttaagcaacccttcatgaggcctgtgcagactactcaagagga |
| | | ggacggctgttcatgccggttcccagaggaggaggaaggcggctgcgaactgcgcgtgaa |
| | | attcagccgcagcgcagatgctccagcctacaagcaggggcagaaccagctctacaacgaa |
| | | ctcaatcttggtcggagagaggagtacgacgtgctggacaagcggagaggacgggaccca |
| | | gaaatgggcgggaagccgcgcagaaagaatccccaagagggcctgtacaacgagctccaa |
| | | aaggataagatggcagaagcctatagcgagattggtatgaaaggggaacgcagaagaggc |
| | | aaaggccacgacggactgtaccagggactcagcaccgccaccaaggacacctatgacgctc |
| | | ttcacatgcaggccctgccgcctcgg |
| CAR 10 | SEQ ID | malpvtalllplalllhaarpdiqmtqspsslsasvgdrvtitcrasqgirnnlawyqqkpgk |
| Full - aa | NO: 1417 | apkrliyaasnlqsgvpsrftgsgsgteftlivsslqpedfatyyclqhhsypltsgggtkveik |
| | | rtgstsgsgkpgsgegsevqvlesggglvqpggslrlscaasgftfssyamswvrqapgkg |
| | | lewvsaisgsggstnyadsvkgrftisrdnskntlylqmnslraedtavyycagssgwsey |
| | | wgqgtivtvsstttpaprpptpaptiasqplslrpeacrpaaggavhtrgldfacdiyiwapla |
| | | gtcgvlllslvitlyckrgrkkllyifkqpfmrpvqttqeedgcscrfpeeeeggcelrvkfsrs |
| | | adapaykqgqnqlynelnlgrreeydvldkrrgrdpemggkprrknpqeglynelqkdk |
| | | [sequence omitted] |

### Mesothelin CAR and Mesothelin-Binding Sequences

[0418] In some embodiments, the TOX^{hi} CAR cell described herein is a mesothelin CAR-expressing cell (e.g., a cell expressing a CAR that binds to human mesothelin). Exemplary mesothelin CARs can include sequences disclosed in WO2015090230 and WO2017112741, e.g., Tables 2, 3, 4, and 5 of WO2017112741, incorporated herein by reference.

[0419] Exemplary mesothelin-binding sequences or mesothelin CAR sequences may comprise a CDR, a variable region, an scFv, or a full-length CAR sequence of a sequence disclosed in Table 19 (or a sequence at least about 85%, 90%, 95%, 99% or more identical thereto, and/or having one, two, three or more substitutions, insertions, deletions, or modifications).

TABLE 19
Amino Acid Sequences of Human scFvs and CARs that bind to mesothelin
(bold underline is the leader sequence and grey box
is a linker sequence). In the case of the scFvs,
the remaining amino acids are the heavy chain variable region and light chain variable regions, with each
of the HC CDRs (HC CDR1, HC CDR2, HC CDR3) and LC CDRs (LC CDR1, LC
CDR2, LCCDR3) underlined. In the case of the CARs, the further
remaining amino acids are the remaining amino acids of the CARs.

| SEQ | | |
|---|---|---|
| ID NO: | Description | Amino Acid Sequence |
| SEQ ID | M1 | QVQLQQSGAEVKKPGASVKVSCKASGYTFTGYYMHWVRQ |
| NO: | (ScFv | APGQGLEWMGRINPNSGGTNYAQKFQGRVTMTRDTSISTAYMELS |
| 1418 | domain) | RLRSEDTAVYYCARG |
| | | RYYGMDVWGQGTMVTVSSGGGGSGGGGSGGGGSGGGGSEIVLT |
| | | QSPATLSLSPGERATIS |
| | | CRASQSVSSNFAWYQQRPGQAPRLLIYDASNRATGIPPRFSGSGSGT |
| | | DFTLTISSLEPED |
| | | FAAYYCHQRSNWLYTFGQGTKVDIK |
| SEQ ID | M1 | MALPVTALLLPLALLLHAARPQVQLQQSGAEVKKPGASVKVSCK |
| NO: | (full) | ASGYTFTGYYMHWVRQ |
| 1419 | >ZA53- | APGQGLEWMGRINPNSGGTNYAQKFQGRVTMTRDTSISTAYMELS |
| | 27BC | RLRSEDTAVYYCARG |
| | (M1 | RYYGMDVWGQGTMVTVSSGGGGSGGGGSGGGGSGGGGSEIVLT |
| | ZA53- | QSPATLSLSPGERATIS |
| | 27BC | CRASQSVSSNFAWYQQRPGQAPRLLIYDASNRATGIPPRFSGSGSGT |
| | R001- | DFTLTISSLEPED |
| | A11 | FAAYYCHQRSNWLYTFGQGTKVDIKTTTPAPRPPTPAPTIASQPLSL |
| | 126161) | RPEACRPAAGGAV |
| | | HTRGLDFACDIYIWAPLAGTCGVLLLSLVITLYCKRGRKKLLYIFKQ |
| | | PFMRPVQTTQEED |
| | | GCSCRFPEEEEGGCELRVKFSRSADAPAYKQGQNQLYNELNLGRR |
| | | EEYDVLDKRRGRDPE |
| | | MGGKPRRKNPQEGLYNELQKDKMAEAYSEIGMKGERRRGKGHD |
| | | GLYQGLSTATKDTYDAL |
| | | HMQALPPR |
| SEQ ID | M2 | QVQLVQSGAEVKKPGASVKVSCKASGYTFTGYYMHWVRQ |
| NO: | (ScFv | APGQGLEWMGWINPNSGGTNYAQKFQGRVTMTRDTSISTAYMEL |
| 1420 | domain) | SRLRSDDTAVYYCARD |
| | | LRRTVVTPRAYYGMDVWGQGTTVTVSSGGGGSGGGGSGGGGSG |
| | | GGGSDIQLTQSPSTLSA |
| | | SVGDRVTITCQASQDISNSLNWYQQKAGKAPKLLIYDASTLETGVP |
| | | SRFSGSGSGTDFSF |
| | | TISSLQPEDIATYYCQQHDNLPLTFGQGTKVEIK |
| SEQ ID | M2 | MALPVTALLLPLALLLHAARPQVQLVQSGAEVKKPGASVKVSCK |
| NO: | (full) | ASGYTFTGYYMHWVRQ |
| 1421 | >FA56- | APGQGLEWMGWINPNSGGTNYAQKFQGRVTMTRDTSISTAYMEL |
| | 26RC | SRLRSDDTAVYYCARD |
| | (M2 | LRRTVVTPRAYYGMDVWGQGTTVTVSSGGGGSGGGGSGGGGSG |
| | FA56- | GGGSDIQLTQSPSTLSA |
| | 26RC | SVGDRVTITCQASQDISNSLNWYQQKAGKAPKLLIYDASTLETGVP |
| | R001- | SRFSGSGSGTDFSF |
| | A10 | TISSLQPEDIATYYCQQHDNLPLTFGQGTKVEIKTTTPAPRPPTPAPT |
| | 126162) | IASQPLSLRPEA |
| | | CRPAAGGAVHTRGLDFACDIYIWAPLAGTCGVLLLSLVITLYCKRG |
| | | RKKLLYIFKQPFMR |
| | | PVQTTQEEDGCSCRFPEEEEGGCELRVKFSRSADAPAYKQGQNQL |
| | | YNELNLGRREEYDVL |
| | | DKRRGRDPEMGGKPRRKNPQEGLYNELQKDKMAEAYSEIGMKGE |
| | | RRRGKGHDGLYQGLST |
| | | ATKDTYDALHMQALPPR |
| SEQ ID | M3 | QVQLVQSGAEVKKPGAPVKVSCKASGYTFTGYYMHWVRQ |
| NO: | (ScFv | APGQGLEWMGWINPNSGGTNYAQKFQGRVTMTRDTSISTAYMEL |
| 1422 | domain) | SRLRSDDTAVYYCARG |
| | | EWDGSYYYDYWGQGTLVTVSSGGGGSGGGGSGGGGSGGGGSDIV |
| | | LTQTPSSLSASVGDRV |
| | | TITCRASQSINTYLNWYQHKPGKAPKLLIYAASSLQSGVPSRFSGSG |
| | | SGTDFTLTISSLQ |
| | | PEDFATYYCQQSFSPLTFGGGTKLEIK |
| SEQ ID | M3 | MALPVTALLLPLALLLHAARPQVQLVQSGAEVKKPGAPVKVSCK |
| NO: | >VA58- | ASGYTFTGYYMHWVRQ |
| 1423 | 21LC | APGQGLEWMGWINPNSGGTNYAQKFQGRVTMTRDTSISTAYMEL |
| | (M3 | SRLRSDDTAVYYCARG |
| | VA58- | EWDGSYYYDYWGQGTLVTVSSGGGGSGGGGSGGGGSGGGGSDIV |
| | 21LC | LTQTPSSLSASVGDRV |
| | R001- | TITCRASQSINTYLNWYQHKPGKAPKLLIYAASSLQSGVPSRFSGSG |
| | A1 | SGTDFTLTISSLQ |
| | 126163) | PEDFATYYCQQSFSPLTFGGGTKLEIKTTTPAPRPPTPAPTIASQPLSL |
| | | RPEACRPAAGG |
| | | AVHTRGLDFACDIYIWAPLAGTCGVLLLSLVITLYCKRGRKKLLYIF |
| | | KQPFMRPVQTTQE |
| | | EDGCSCRFPEEEEGGCELRVKFSRSADAPAYKQGQNQLYNELNLG |
| | | RREEYDVLDKRRGRD |
| | | PEMGGKPRRKNPQEGLYNELQKDKMAEAYSEIGMKGERRRGKGH |
| | | DGLYQGLSTATKDTYD |
| | | ALHMQALPPR |
| SEQ ID | M4 | QVQLVESGGGLVQPGGSLRLSCAASGFTFSSYWMHWVRQ |
| NO: | (ScFv | VPGKGLVWVSRINTDGSTTTYADSVEGRFTISRDNAKNTLYLQMN |
| 1424 | domain) | SLRDDDTAVYYCVGG |
| | | HWAVWGQGTTVTVSSGGGGSGGGGSGGGGSGGGGSDIQMTQSPS |
| | | TLSASVGDRVTITCRA |
| | | SQSISDRLAWYQQKPGKAPKLLIYKASSLESGVPSRFSGSGSGTEFT |
| | | LTISSLQPDDFAV |
| | | YYCQQYGHLPMYTFGQGTKVEIK |
| SEQ ID | M4 | MALPVTALLLPLALLLHAARPQVQLVESGGGLVQPGGSLRLSCA |
| NO: | >DP37- | ASGFTFSSYWMHWVRQ |
| 1425 | 07IC | VPGKGLVWVSRINTDGSTTTYADSVEGRFTISRDNAKNTLYLQMN |
| | (M4 | SLRDDDTAVYYCVGG |
| | DP37- | HWAVWGQGTTVTVSSGGGGSGGGGSGGGGSGGGGSDIQMTQSPS |
| | 07IC | TLSASVGDRVTITCRA |
| | R001- | SQSISDRLAWYQQKPGKAPKLLIYKASSLESGVPSRFSGSGSGTEFT |
| | C6 | LTISSLQPDDFAV |
| | 126164) | YYCQQYGHLPMYTFGQGTKVEIKTTTPAPRPPTPAPTIASQPLSLRP |
| | | EACRPAAGGAVHT |
| | | RGLDFACDIYIWAPLAGTCGVLLLSLVITLYCKRGRKKLLYIFKQPF |
| | | MRPVQTTQEEDGC |
| | | SCRFPEEEEGGCELRVKFSRSADAPAYKQGQNQLYNELNLGRREE |
| | | YDVLDKRRGRDPEMG |
| | | GKPRRKNPQEGLYNELQKDKMAEAYSEIGMKGERRRGKGHDGLY |
| | | QGLSTATKDTYDALHM |
| | | QALPPR |
| SEQ ID | M5 | QVQLVQSGAEVEKPGASVKVSCKASGYTFTDYYMHWVRQ |
| NO: | (ScFv | APGQGLEWMGWINPNSGGTNYAQKFQGRVTMTRDTSISTAYMEL |
| 1426 | domain) | SRLRSDDTAVYYCASG |
| | | WDFDYWGQGTLVTVSSGGGGSGGGGSGGGGSGGGGSDIVMTQSP |
| | | SSLSASVGDRVTITCR |
| | | ASQSIRYYLSWYQQKPGKAPKLLIYTASILQNGVPSRFSGSGSGTDF |
| | | TLTISSLQPEDFA |
| | | TYYCLQTYTTPDFGPGTKVEIK |
| SEQ ID | M5 | MALPVTALLLPLALLLHAARPQVQLVQSGAEVEKPGASVKVSCK |
| NO: | >XP31- | ASGYTFTDYYMHWVRQ |
| 1427 | 20LC | APGQGLEWMGWINPNSGGTNYAQKFQGRVTMTRDTSISTAYMEL |
| | (M5 | SRLRSDDTAVYYCASG |
| | XP31- | WDFDYWGQGTLVTVSSGGGGSGGGGSGGGGSGGGGSDIVMTQSP |
| | 20LC | SSLSASVGDRVTITCR |
| | R001- | ASQSIRYYLSWYQQKPGKAPKLLIYTASILQNGVPSRFSGSGSGTDF |
| | B4 | TLTISSLQPEDFA |
| | 126165) | TYYCLQTYTTPDFGPGTKVEIKTTTPAPRPPTPAPTIASQPLSLRPEA |
| | | CRPAAGGAVHTR |
| | | GLDFACDIYIWAPLAGTCGVLLLSLVITLYCKRGRKKLLYIFKQPFM |
| | | RPVQTTQEEDGCS |
| | | CRFPEEEEGGCELRVKFSRSADAPAYKQGQNQLYNELNLGRREEY |
| | | DVLDKRRGRDPEMGG |
| | | KPRRKNPQEGLYNELQKDKMAEAYSEIGMKGERRRGKGHDGLYQ |
| | | GLSTATKDTYDALHMQ |
| | | ALPPR |
| SEQ ID | M6 | QVQLVQSGAEVKKPGASVKVSCKASGYTFTSYYMHWVRQ |
| NO: | (ScFv | APGQGLEWMGIINPSGGSTSYAQKFQGRVTMTRDTSTSTVYMELSS |
| 1428 | domain) | LRSEDTAVYYCARY |
| | | RLIAVAGDYYYYGMDVWGQGTMVTVSSGGGGSGGGGSGGGGSG |
| | | GGGSDIQMTQSPSSVSA |
| | | SVGDRVTITCRASQGVGRWLAWYQQKPGTAPKLLIYAASTLQSGV |
| | | PSRFSGSGSGTDFTL |
| | | TINNLQPEDFATYYCQQANSFPLTFGGGTRLEIK |
| SEQ ID | M6 | MALPVTALLLPLALLLHAARPQVQLVQSGAEVKKPGASVKVSCK |
| NO: | >FE10- | ASGYTFTSYYMHWVRQ |
| 1429 | 06ID | APGQGLEWMGIINPSGGSTSYAQKFQGRVTMTRDTSTSTVYMELSS |
| | (M6 | LRSEDTAVYYCARY |
| | 46FE10- | RLIAVAGDYYYYGMDVWGQGTMVTVSSGGGGSGGGGSGGGGSG |
| | 06ID | GGGSDIQMTQSPSSVSA |
| | R001- | SVGDRVTITCRASQGVGRWLAWYQQKPGTAPKLLIYAASTLQSGV |
| | A4 | PSRFSGSGSGTDFTL |
| | 126166) | TINNLQPEDFATYYCQQANSFPLTFGGGTRLEIKTTTPAPRPPTPAPT |
| | | IASQPLSLRPEA |
| | | CRPAAGGAVHTRGLDFACDIYIWAPLAGTCGVLLLSLVITLYCKRG |
| | | RKKLLYIFKQPFMR |
| | | PVQTTQEEDGCSCRFPEEEEGGCELRVKFSRSADAPAYKQGQNQL |
| | | YNELNLGRREEYDVL |
| | | DKRRGRDPEMGGKPRRKNPQEGLYNELQKDKMAEAYSEIGMKGE |
| | | RRRGKGHDGLYQGLST |
| | | ATKDTYDALHMQALPPR |
| SEQ ID | M7 | QVQLVQSGGGVVQPGRSLRLSCAASGFTFSSYAMHWVRQ |
| NO: | (ScFv | APGKGLEWVAVISYDGSNKYYADSVKGRFTISRDNSKNTLYLQMN |
| 1430 | domain) | SLRAEDTAVYYCARW |
| | | KVSSSSPAFDYWGQGTLVTVSSGGGGSGGGGSGGGGSGGGGSEIV |
| | | LTQSPATLSLSPGER |
| | | AILSCRASQSVYTKYLGWYQQKPGQAPRLLIYDASTRATGIPDRFS |
| | | GSGSGTDFTLTINR |
| | | LEPEDFAVYYCQHYGGSPLITFGQGTRLEIK |
| SEQ ID | M7 | MALPVTALLLPLALLLHAARPQVQLVQSGGGVVQPGRSLRLSCA |
| NO: | >VE12- | ASGFTFSSYAMHWVRQ |
| 1431 | 01CD | APGKGLEWVAVISYDGSNKYYADSVKGRFTISRDNSKNTLYLQMN |
| | (M7 | SLRAEDTAVYYCARW |
| | VE12- | KVSSSSPAFDYWGQGTLVTVSSGGGGSGGGGSGGGGSGGGGSEIV |
| | 01CD | LTQSPATLSLSPGER |
| | R001- | AILSCRASQSVYTKYLGWYQQKPGQAPRLLIYDASTRATGIPDRFS |
| | A5 | GSGSGTDFTLTINR |
| | 126167) | LEPEDFAVYYCQHYGGSPLITFGQGTRLEIKTTTPAPRPPTPAPTIAS |
| | | QPLSLRPEACRP |
| | | AAGGAVHTRGLDFACDIYIWAPLAGTCGVLLLSLVITLYCKRGRK |
| | | KLLYIFKQPFMRPVQ |
| | | TTQEEDGCSCRFPEEEEGGCELRVKFSRSADAPAYKQGQNQLYNEL |
| | | NLGRREEYDVLDKR |
| | | RGRDPEMGGKPRRKNPQEGLYNELQKDKMAEAYSEIGMKGERRR |
| | | GKGHDGLYQGLSTATK |
| | | DTYDALHMQALPPR |
| SEQ ID | M8 | QVQLQQSGAEVKKPGASVKVSCKTSGYPFTGYSLHWVRQ |
| NO: | (ScFv | APGQGLEWMGWINPNSGGTNYAQKFQGRVTMTRDTSISTAYMEL |
| 1432 | domain) | SRLRSDDTAVYYCARD |
| | | HYGGNSLFYWGQGTLVTVSSGGGGSGGGGSGGGGSGGGGSDIQL |
| | | TQSPSSISASVGDTVS |
| | | ITCRASQDSGTWLAWYQQKPGKAPNLLMYDASTLEDGVPSRFSGS |
| | | ASGTEFTLTVNRLQP |
| | | EDSATYYCQQYNSYPLTFGGGTKVDIK |
| SEQ ID | M8 | MALPVTALLLPLALLLHAARPQVQLQQSGAEVKKPGASVKVSCK |
| NO: | >LE13- | TSGYPFTGYSLHWVRQ |
| 1433 | 05XD | APGQGLEWMGWINPNSGGTNYAQKFQGRVTMTRDTSISTAYMEL |
| | (M8 | SRLRSDDTAVYYCARD |
| | LE13- | HYGGNSLFYWGQGTLVTVSSGGGGSGGGGSGGGGSGGGGSDIQL |
| | 05XD | TQSPSSISASVGDTVS |
| | R001- | ITCRASQDSGTWLAWYQQKPGKAPNLLMYDASTLEDGVPSRFSGS |
| | E5 | ASGTEFTLTVNRLQP |
| | 126168) | EDSATYYCQQYNSYPLTFGGGTKVDIKTTTPAPRPPTPAPTIASQPL |
| | | SLRPEACRPAAGG |
| | | AVHTRGLDFACDIYIWAPLAGTCGVLLLSLVITLYCKRGRKKLLYIF |
| | | KQPFMRPVQTTQE |
| | | EDGCSCRFPEEEEGGCELRVKFSRSADAPAYKQGQNQLYNELNLG |
| | | RREEYDVLDKRRGRD |
| | | PEMGGKPRRKNPQEGLYNELQKDKMAEAYSEIGMKGERRRGKGH |
| | | DGLYQGLSTATKDTYD |
| | | ALHMQALPPR |
| SEQ ID | M9 | QVQLVQSGAEVKKPGASVEVSCKASGYTFTSYYMHWVRQ |
| NO: | (ScFv | APGQGLEWMGIINPSGGSTGYAQKFQGRVTMTRDTSTSTVHMELS |
| 1434 | domain) | SLRSEDTAVYYCARG |
| | | GYSSSSDAFDIWGQGTMVTVSSGGGGSGGGGSGGGGSGGGGSDIQ |
| | | MTQSPPSLSASVGDR |
| | | VTITCRASQDISSALAWYQQKPGTPPKLLIYDASSLESGVPSRFSGS |
| | | GSGTDFTLTISSL |
| | | QPEDFATYYCQQFSSYPLTFGGGTRLEIK |
| SEQ ID | M9 | MALPVTALLLPLALLLHAARPQVQLVQSGAEVKKPGASVEVSCK |
| NO: | >BE15- | ASGYTFTSYYMHWVRQ |
| 1435 | 00SD | APGQGLEWMGIINPSGGSTGYAQKFQGRVTMTRDTSTSTVHMELS |
| | (M9 | SLRSEDTAVYYCARG |
| | BE15- | GYSSSSDAFDIWGQGTMVTVSSGGGGSGGGGSGGGGSGGGGSDIQ |
| | 00SD | MTQSPPSLSASVGDR |
| | R001- | VTITCRASQDISSALAWYQQKPGTPPKLLIYDASSLESGVPSRFSGS |
| | A3 | GSGTDFTLTISSL |
| | 126169) | QPEDFATYYCQQFSSYPLTFGGGTRLEIKTTTPAPRPPTPAPTIASQP |
| | | LSLRPEACRPAA |
| | | GGAVHTRGLDFACDIYIWAPLAGTCGVLLLSLVITLYCKRGRKKLL |
| | | YIFKQPFMRPVQTT |
| | | QEEDGCSCRFPEEEEGGCELRVKFSRSADAPAYKQGQNQLYNELN |
| | | LGRREEYDVLDKRRG |
| | | RDPEMGGKPRRKNPQEGLYNELQKDKMAEAYSEIGMKGERRRGK |
| | | GHDGLYQGLSTATKDT |
| | | YDALHMQALPPR |
| SEQ ID | M10 | QVQLVQSGAEVKKPGASVKVSCKASGYTFTSYGISWVRQ |
| NO: | (ScFv | APGQGLEWMGWISAYNGNTNYAQKLQGRVTMTTDTSTSTAYMEL |
| 1436 | domain) | RSLRSDDTAVYYCARV |
| | | AGGIYYYYGMDVWGQGTTITVSSGGGGSGGGGSGGGGSGGGGSD |
| | | IVMTQTPDSLAVSLGE |
| | | RATISCKSSHSVLYNRNNKNYLAWYQQKPGQPPKLLFYWASTRKS |
| | | GVPDRFSGSGSGTDF |
| | | TLTISSLQPEDFATYFCQQTQTFPLTFGQGTRLEIN |
| SEQ ID | M10 | MALPVTALLLPLALLLHAARPQVQLVQSGAEVKKPGASVKVSCK |
| NO: | >RE16- | ASGYTFTSYGISWVRQ |
| 1437 | 05MD | APGQGLEWMGWISAYNGNTNYAQKLQGRVTMTTDTSTSTAYMEL |
| | (M10 | RSLRSDDTAVYYCARV |
| | RE16- | AGGIYYYYGMDVWGQGTTITVSSGGGGSGGGGSGGGGSGGGGSD |
| | 05MD | IVMTQTPDSLAVSLGE |
| | R001- | RATISCKSSHSVLYNRNNKNYLAWYQQKPGQPPKLLFYWASTRKS |
| | D10 | GVPDRFSGSGSGTDF |
| | 126170) | TLTISSLQPEDFATYFCQQTQTFPLTFGQGTRLEINTTTPAPRPPTPAP |
| | | TIASQPLSLRP |
| | | EACRPAAGGAVHTRGLDFACDIYIWAPLAGTCGVLLLSLVITLYCK |
| | | RGRKKLLYIFKQPF |
| | | MRPVQTTQEEDGCSCRFPEEEEGGCELRVKFSRSADAPAYKQGQN |
| | | QLYNELNLGRREEYD |
| | | VLDKRRGRDPEMGGKPRRKNPQEGLYNELQKDKMAEAYSEIGMK |
| | | GERRRGKGHDGLYQGL |
| | | STATKDTYDALHMQALPPR |
| SEQ ID | M11 | QVQLQQSGAEVKKPGASVKVSCKASGYTFTGYYMHWVRQ |
| NO: | (ScFv | APGQGLEWMGWINPNSGGTNYAQNFQGRVTMTRDTSISTAYMEL |
| 1438 | domain) | RRLRSDDTAVYYCASG |
| | | WDFDYWGQGTLVTVSSGGGGSGGGGSGGGGSGGGGSDIRMTQSP |
| | | SSLSASVGDRVTITCR |
| | | ASQSIRYYLSWYQQKPGKAPKLLIYTASILQNGVPSRFSGSGSGTDF |
| | | TLTISSLQPEDFA |
| | | TYYCLQTYTTPDFGPGTKVEIK |
| SEQ ID | M11 | MALPVTALLLPLALLLHAARPQVQLQQSGAEVKKPGASVKVSCK |
| NO: | >NE10- | ASGYTFTGYYMHWVRQ |
| 1439 | 19WD | APGQGLEWMGWINPNSGGTNYAQNFQGRVTMTRDTSISTAYMEL |
| | (M11 | RRLRSDDTAVYYCASG |
| | NE10- | WDFDYWGQGTLVTVSSGGGGSGGGGSGGGGSGGGGSDIRMTQSP |
| | 19WD | SSLSASVGDRVTITCR |
| | R001- | ASQSIRYYLSWYQQKPGKAPKLLIYTASILQNGVPSRFSGSGSGTDF |
| | G2 | TLTISSLQPEDFA |
| | 126171) | TYYCLQTYTTPDFGPGTKVEIKTTTPAPRPPTPAPTIASQPLSLRPEA |
| | | CRPAAGGAVHTR |
| | | GLDFACDIYIWAPLAGTCGVLLLSLVITLYCKRGRKKLLYIFKQPFM |
| | | RPVQTTQEEDGCS |
| | | CRFPEEEEGGCELRVKFSRSADAPAYKQGQNQLYNELNLGRREEY |
| | | DVLDKRRGRDPEMGG |
| | | KPRRKNPQEGLYNELQKDKMAEAYSEIGMKGERRRGKGHDGLYQ |
| | | GLSTATKDTYDALHMQ |
| | | ALPPR |
| SEQ ID | M12 | QVQLVQSGAEVKKPGASVKVSCKASGYTFTGYYMHWVRQ |
| NO: | (ScFv | APGQGLEWMGRINPNSGGTNYAQKFQGRVTMTTDTSTSTAYMEL |
| 1440 | domain) | RSLRSDDTAVYYCART |
| | | TTSYAFDIWGQGTMVTVSSGGGGSGGGGSGGGGSGGGGSDIQLTQ |
| | | SPSTLSASVGDRVTI |
| | | TCRASQSISTWLAWYQQKPGKAPNLLIYKASTLESGVPSRFSGSGS |
| | | GTEFTLTISSLQPD |
| | | DFATYYCQQYNTYSPYTFGQGTKLEIK |
| SEQ ID | M12 | MALPVTALLLPLALLLHAARPQVQLVQSGAEVKKPGASVKVSCK |
| NO: | >DE12- | ASGYTFTGYYMHWVRQ |
| 1441 | 14RD | APGQGLEWMGRINPNSGGTNYAQKFQGRVTMTTDTSTSTAYMEL |
| | (M12 | RSLRSDDTAVYYCART |
| | DE12- | TTSYAFDIWGQGTMVTVSSGGGGSGGGGSGGGGSGGGGSDIQLTQ |
| | 14RD | SPSTLSASVGDRVTI |
| | R001- | TCRASQSISTWLAWYQQKPGKAPNLLIYKASTLESGVPSRFSGSGS |
| | G9 | GTEFTLTISSLQPD |
| | 126172) | DFATYYCQQYNTYSPYTFGQGTKLEIKTTTPAPRPPTPAPTIASQPLS |
| | | LRPEACRPAAGG |
| | | AVHTRGLDFACDIYIWAPLAGTCGVLLLSLVITLYCKRGRKKLLYIF |
| | | KQPFMRPVQTTQE |
| | | EDGCSCRFPEEEEGGCELRVKFSRSADAPAYKQGQNQLYNELNLG |
| | | RREEYDVLDKRRGRD |
| | | PEMGGKPRRKNPQEGLYNELQKDKMAEAYSEIGMKGERRRGKGH |
| | | DGLYQGLSTATKDTYD |
| | | ALHMQALPPR |
| SEQ ID | M13 | QVQLVQSGGGLVKPGGSLRLSCEASGFIFSDYYMGWIRQ |
| NO: | (ScFv | APGKGLEWVSYIGRSGSSMYYADSVKGRFTFSRDNAKNSLYLQMN |
| 1442 | domain) | SLRAEDTAVYYCAAS |
| | | PVVAATEDFQHWGQGTLVTVSSGGGGSGGGGSGGGGSGGGGSDI |
| | | VMTQTPATLSLSPGER |
| | | ATLSCRASQSVTSNYLAWYQQKPGQAPRLLLFGASTRATGIPDRFS |
| | | GSGSGTDFTLTINR |
| | | LEPEDFAMYYCQQYGSAPVTFGQGTKLEIK |
| SEQ ID | M13 | MALPVTALLLPLALLLHAARPQVQLVQSGGGLVKPGGSLRLSCE |
| NO: | >TE13- | ASGFIFSDYYMGWIRQ |
| 1443 | 19LD | APGKGLEWVSYIGRSGSSMYYADSVKGRFTFSRDNAKNSLYLQMN |
| | (M13 | SLRAEDTAVYYCAAS |
| | TE13- | PVVAATEDFQHWGQGTLVTVSSGGGGSGGGGSGGGGSGGGGSDI |
| | 19LD | VMTQTPATLSLSPGER |
| | R002- | ATLSCRASQSVTSNYLAWYQQKPGQAPRLLLFGASTRATGIPDRFS |
| | C3 | GSGSGTDFTLTINR |
| | 126173) | LEPEDFAMYYCQQYGSAPVTFGQGTKLEIKTTTPAPRPPTPAPTIAS |
| | | QPLSLRPEACRPA |
| | | AGGAVHTRGLDFACDIYIWAPLAGTCGVLLLSLVITLYCKRGRKKL |
| | | LYIFKQPFMRPVQT |
| | | TQEEDGCSCRFPEEEEGGCELRVKFSRSADAPAYKQGQNQLYNEL |
| | | NLGRREEYDVLDKRR |
| | | GRDPEMGGKPRRKNPQEGLYNELQKDKMAEAYSEIGMKGERRRG |
| | | KGHDGLYQGLSTATKD |
| | | TYDALHMQALPPR |
| SEQ ID | M14 | QVQLVQSGAEVRAPGASVKISCKASGFTFRGYYIHWVRQ |
| NO: | (ScFv | APGQGLEWMGIINPSGGSRAYAQKFQGRVTMTRDTSTSTVYMELS |
| 1444 | domain) | SLRSDDTAMYYCART |
| | | ASCGGDCYYLDYWGQGTLVTVSSGGGGSGGGGSGGGGSGGGGSD |
| | | IQMTQSPPTLSASVGD |
| | | RVTITCRASENVNIWLAWYQQKPGKAPKLLIYKSSSLASGVPSRFS |
| | | GSGSGAEFTLTISS |
| | | LQPDDFATYYCQQYQSYPLTFGGGTKVDIK |
| SEQ ID | M14 | MALPVTALLLPLALLLHAARPQVQLVQSGAEVRAPGASVKISCK |
| NO: | >B583- | ASGFTFRGYYIHWVRQ |
| 1445 | 95ID | APGQGLEWMGIINPSGGSRAYAQKFQGRVTMTRDTSTSTVYMELS |
| | (M14 | SLRSDDTAMYYCART |
| | BS83- | ASCGGDCYYLDYWGQGTLVTVSSGGGGSGGGGSGGGGSGGGGSD |
| | 95ID | IQMTQSPPTLSASVGD |
| | R001- | RVTITCRASENVNIWLAWYQQKPGKAPKLLIYKSSSLASGVPSRFS |
| | E8 | GSGSGAEFTLTISS |
| | 126174) | LQPDDFATYYCQQYQSYPLTFGGGTKVDIKTTTPAPRPPTPAPTIAS |
| | | QPLSLRPEACRPA |
| | | AGGAVHTRGLDFACDIYIWAPLAGTCGVLLLSLVITLYCKRGRKKL |
| | | LYIFKQPFMRPVQT |
| | | TQEEDGCSCRFPEEEEGGCELRVKFSRSADAPAYKQGQNQLYNEL |
| | | NLGRREEYDVLDKRR |
| | | GRDPEMGGKPRRKNPQEGLYNELQKDKMAEAYSEIGMKGERRRG |
| | | KGHDGLYQGLSTATKD |
| | | TYDALHMQALPPR |
| SEQ ID | M15 | QVQLVQSGGGLVQPGRSLRLSCAASGFTFDDYAMHWVRQ |
| NO: | (ScFv | APGKGLEWVSGISWNSGSIGYADSVKGRFTISRDNAKNSLYLQMN |
| 1446 | domain) | SLRAEDTAVYYCAKD |
| | | GSSSWSWGYFDYWGQGTLVTVSSGGGGSGGGGSGGGGSSSELTQ |
| | | DPAVSVALGQTVRTTC |
| | | QGDALRSYYASWYQQKPGQAPMLVIYGKNNRPSGIPDRFSGSDSG |
| | | DTASLTITGAQAEDE |
| | | ADYYCNSRDSSGYPVFGTGTKVTVL |
| SEQ ID | M15 | MALPVTALLLPLALLLHAARPQVQLVQSGGGLVQPGRSLRLSCA |
| NO: | >H586- | ASGFTFDDYAMHWVRQ |
| 1447 | 94XD | APGKGLEWVSGISWNSGSIGYADSVKGRFTISRDNAKNSLYLQMN |
| | (M15 | SLRAEDTAVYYCAKD |
| | HS86- | GSSSWSWGYFDYWGQGTLVTVSSGGGGSGGGGSGGGGSSSELTQ |
| | 94XD | DPAVSVALGQTVRTTC |
| | NT | QGDALRSYYASWYQQKPGQAPMLVIYGKNNRPSGIPDRFSGSDSG |
| | 127553) | DTASLTITGAQAEDE |
| | | ADYYCNSRDSSGYPVFGTGTKVTVLTTTPAPRPPTPAPTIASQPLSL |
| | | RPEACRPAAGGAV |
| | | HTRGLDFACDIYIWAPLAGTCGVLLLSLVITLYCKRGRKKLLYIFKQ |
| | | PFMRPVQTTQEED |
| | | GCSCRFPEEEEGGCELRVKFSRSADAPAYKQGQNQLYNELNLGRR |
| | | EEYDVLDKRRGRDPE |
| | | MGGKPRRKNPQEGLYNELQKDKMAEAYSEIGMKGERRRGKGHD |
| | | GLYQGLSTATKDTYDAL |
| | | HMQALPPR |
| SEQ ID | M16 | EVQLVESGGGLVQPGRSLRLSCAASGFTFDDYAMHWVRQ |
| NO: | (ScFv | APGKGLEWVSGISWNSGSTGYADSVKGRFTISRDNAKNSLYLQMN |
| 1448 | domain) | SLRAEDTALYYCAKD |
| | | SSSWYGGGSAFDIWGQGTMVTVSSGGGGSGGGGSGGGGSSSELTQ |
| | | EPAVSVALGQTVRIT |
| | | CQGDSLRSYYASWYQQKPGQAPVLVIFGRSRRPSGIPDRFSGSSSG |
| | | NTASLIITGAQAED |
| | | EADYYCNSRDNTANHYVFGTGTKLTVL |
| SEQ ID | M16 | MALPVTALLLPLALLLHAARPEVQLVESGGGLVQPGRSLRLSCA |
| NO: | >X587- | ASGFTFDDYAMHWVRQ |
| 1449 | 99RD | APGKGLEWVSGISWNSGSTGYADSVKGRFTISRDNAKNSLYLQMN |
| | (M16 | SLRAEDTALYYCAKD |
| | XS87- | SSSWYGGGSAFDIWGQGTMVTVSSGGGGSGGGGSGGGGSSSELTQ |
| | 99RD | EPAVSVALGQTVRIT |
| | NT | CQGDSLRSYYASWYQQKPGQAPVLVIFGRSRRPSGIPDRFSGSSSG |
| | 127554) | NTASLIITGAQAED |
| | | EADYYCNSRDNTANHYVFGTGTKLTVLTTTPAPRPPTPAPTIASQPL |
| | | SLRPEACRPAAGG |
| | | AVHTRGLDFACDIYIWAPLAGTCGVLLLSLVITLYCKRGRKKLLYIF |
| | | KQPFMRPVQTTQE |
| | | EDGCSCRFPEEEEGGCELRVKFSRSADAPAYKQGQNQLYNELNLG |
| | | RREEYDVLDKRRGRD |
| | | PEMGGKPRRKNPQEGLYNELQKDKMAEAYSEIGMKGERRRGKGH |
| | | DGLYQGLSTATKDTYD |
| | | ALHMQALPPR |
| SEQ ID | M17 | EVQLVESGGGLVQPGRSLRLSCAASGFTFDDYAMHWVRQ |
| NO: | (ScFv | APGKGLEWVSGISWNSGSTGYADSVKGRFTISRDNAKNSLYLQMN |
| 1450 | domain) | SLRAEDTALYYCAKD |
| | | SSSWYGGGSAFDIWGQGTMVTVSSGGGGSGGGGSGGGGSSSELTQ |
| | | DPAVSVALGQTVRIT |
| | | CQGDSLRSYYASWYQQKPGQAPVLVIYGKNNRPSGIPDRFSGSSSG |
| | | NTASLTITGAQAED |
| | | EADYYCNSRGSSGNHYVFGTGTKVTVL |
| SEQ ID | M17 | MALPVTALLLPLALLLHAARPEVQLVESGGGLVQPGRSLRLSCA |
| NO: | >N589- | ASGFTFDDYAMHWVRQ |
| 1451 | 94MD | APGKGLEWVSGISWNSGSTGYADSVKGRFTISRDNAKNSLYLQMN |
| | (M17 | SLRAEDTALYYCAKD |
| | NS89- | SSSWYGGGSAFDIWGQGTMVTVSSGGGGSGGGGSGGGGSSSELTQ |
| | 94MD | DPAVSVALGQTVRIT |
| | NT | CQGDSLRSYYASWYQQKPGQAPVLVIYGKNNRPSGIPDRFSGSSSG |
| | 127555) | NTASLTITGAQAED |
| | | EADYYCNSRGSSGNHYVFGTGTKVTVLTTTPAPRPPTPAPTIASQPL |
| | | SLRPEACRPAAGG |
| | | AVHTRGLDFACDIYIWAPLAGTCGVLLLSLVITLYCKRGRKKLLYIF |
| | | KQPFMRPVQTTQE |
| | | EDGCSCRFPEEEEGGCELRVKFSRSADAPAYKQGQNQLYNELNLG |
| | | RREEYDVLDKRRGRD |
| | | PEMGGKPRRKNPQEGLYNELQKDKMAEAYSEIGMKGERRRGKGH |
| | | DGLYQGLSTATKDTYD |
| | | ALHMQALPPR |
| SEQ ID | M18 | QVQLVQSGGGLVQPGGSLRLSCAASGFTFSSYWMHWVRQ |
| NO: | (ScFv | APGKGLVWVSRINSDGSSTSYADSVKGRFTISRDNAKNTLYLQMN |
| 1452 | domain) | SLRAEDTAVYYCVRT |
| | | GWVGSYYYYMDVWGKGTTVTVSSGGGGSGGGGSGGGGSGGGGS |
| | | EIVLTQSPGTLSLSPGE |
| | | RATLSCRASQSVSSNYLAWYQQKPGQPPRLLIYDVSTRATGIPARFS |
| | | GGGSGTDFTLTIS |
| | | SLEPEDFAVYYCQQRSNWPPWTFGQGTKVEIK |
| SEQ ID | M18 | MALPVTALLLPLALLLHAARPQVQLVQSGGGLVQPGGSLRLSCA |
| NO: | >D590- | ASGFTFSSYWMHWVRQ |
| 1453 | 09HD | APGKGLVWVSRINSDGSSTSYADSVKGRFTISRDNAKNTLYLQMN |
| | (M18 | SLRAEDTAVYYCVRT |
| | D590- | GWVGSYYYYMDVWGKGTTVTVSSGGGGSGGGGSGGGGSGGGGS |
| | 09HD | EIVLTQSPGTLSLSPGE |
| | R003- | RATLSCRASQSVSSNYLAWYQQKPGQPPRLLIYDVSTRATGIPARFS |
| | A05 | GGGSGTDFTLTIS |
| | 127556) | SLEPEDFAVYYCQQRSNWPPWTFGQGTKVEIKTTTPAPRPPTPAPTI |
| | | ASQPLSLRPEACR |
| | | PAAGGAVHTRGLDFACDIYIWAPLAGTCGVLLLSLVITLYCKRGRK |
| | | KLLYIFKQPFMRPV |
| | | QTTQEEDGCSCRFPEEEEGGCELRVKFSRSADAPAYKQGQNQLYN |
| | | ELNLGRREEYDVLDK |
| | | RRGRDPEMGGKPRRKNPQEGLYNELQKDKMAEAYSEIGMKGERR |
| | | RGKGHDGLYQGLSTAT |
| | | KDTYDALHMQALPPR |
| SEQ ID | M19 | QVQLVQSGGGVVQPGRSLRLSCAASGFTFSSYGMHWVRQ |
| NO: | (ScFv | APGKGLEWVAVISYDGSNKYYADSVKGRFTISRDNSKNTLYLQMN |
| 1454 | domain) | SLRAEDTAVYYCAKG |
| | | YSRYYYYGMDVWGQGTTVTVSSGGGGSGGGGSGGGGSGGGGSEI |
| | | VMTQSPATLSLSPGER |
| | | AILSCRASQSVYTKYLGWYQQKPGQAPRLLIYDASTRATGIPDRFS |
| | | GSGSGTDFTLTINR |
| | | LEPEDFAVYYCQHYGGSPLITFGQGTKVDIK |
| SEQ ID | M19 | MALPVTALLLPLALLLHAARPQVQLVQSGGGVVQPGRSLRLSCA |
| NO: | >T592- | ASGFTFSSYGMHWVRQ |
| 1455 | 04BD | APGKGLEWVAVISYDGSNKYYADSVKGRFTISRDNSKNTLYLQMN |
| | (M19 | SLRAEDTAVYYCAKG |
| | T592- | YSRYYYYGMDVWGQGTTVTVSSGGGGSGGGGSGGGGSGGGGSEI |
| | 04BD | VMTQSPATLSLSPGER |
| | R003- | AILSCRASQSVYTKYLGWYQQKPGQAPRLLIYDASTRATGIPDRFS |
| | C06 | GSGSGTDFTLTINR |
| | 127557) | LEPEDFAVYYCQHYGGSPLITFGQGTKVDIKTTTPAPRPPTPAPTIAS |
| | | QPLSLRPEACRP |
| | | AAGGAVHTRGLDFACDIYIWAPLAGTCGVLLLSLVITLYCKRGRK |
| | | KLLYIFKQPFMRPVQ |
| | | TTQEEDGCSCRFPEEEEGGCELRVKFSRSADAPAYKQGQNQLYNEL |
| | | NLGRREEYDVLDKR |
| | | RGRDPEMGGKPRRKNPQEGLYNELQKDKMAEAYSEIGMKGERRR |
| | | GKGHDGLYQGLSTATK |
| | | DTYDALHMQALPPR |
| SEQ ID | M20 | QVQLVQSGGGLVQPGGSLRLSCAASGFTFSSYAMSWVRQ |
| NO: | (ScFv | APGKGLEWVSAISGSGGSTYYADSVKGRFTISRDNSKNTLYLQMNS |
| 1456 | domain) | LRAEDTAVYYCAKR |
| | | EAAAGHDWYFDLWGRGTLVTVSSGGGGSGGGGSGGGGSGGGGS |
| | | DIRVTQSPSSLSASVGD |
| | | RVTITCRASQSISSYLNWYQQKPGKAPKLLIYAASSLQSGVPSRFSG |
| | | SGSGTDFTLTISS |
| | | LQPEDFATYYCQQSYSIPLTFGQGTKVEIK |
| SEQ ID | M20 | MALPVTALLLPLALLLHAARPQVQLVQSGGGLVQPGGSLRLSCA |
| NO: | (full) | ASGFTFSSYAMSWVRQ |
| 1457 | >J593- | APGKGLEWVSAISGSGGSTYYADSVKGRFTISRDNSKNTLYLQMNS |
| | 08WD | LRAEDTAVYYCAKR |
| | (M20 | EAAAGHDWYFDLWGRGTLVTVSSGGGGSGGGGSGGGGSGGGGS |
| | J593- | DIRVTQSPSSLSASVGD |
| | 08WD | |
| | R003- | RVTITCRASQSISSYLNWYQQKPGKAPKLLIYAASSLQSGVPSRFSG |
| | E07 | SGSGTDFTLTISS |
| | 127558) | LQPEDFATYYCQQSYSIPLTFGQGTKVEIKTTTPAPRPPTPAPTIASQ |
| | | PLSLRPEACRPA |
| | | AGGAVHTRGLDFACDIYIWAPLAGTCGVLLLSLVITLYCKRGRKKL |
| | | LYIFKQPFMRPVQT |
| | | TQEEDGCSCRFPEEEEGGCELRVKFSRSADAPAYKQGQNQLYNEL |
| | | NLGRREEYDVLDKRR |
| | | GRDPEMGGKPRRKNPQEGLYNELQKDKMAEAYSEIGMKGERRRG |
| | | KGHDGLYQGLSTATKD |
| | | TYDALHMQALPPR |
| SEQ ID | M21 | QVQLVQSWAEVKKPGASVKVSCKASGYTFTSYYMHWVRQAPGQ |
| NO: | (ScFv | GLEWMGIINPSGGSTSYAQKFQGRVTMTRDTSTSTVYMELSNLRSE |
| 1458 | domain) | DTAVYYCARSPRVTTGYFDYWGQGTLVTVSSGGGGSGGGGSGGG |
| | | GSGGGGSDIQLTQSPSTLSASVGDRVTITCRASQSISSWLAWYQQKP |
| | | GKAPKLLIYKASSLESGVPSRFSGSGSGTEFTLTISSLQPDDFATYYC |
| | | QQYSSYPLTFGGGTRLEIK |
| SEQ ID | M21 | MALPVTALLLPLALLLHAARPQVQLVQSWAEVKKPGASVKVSC |
| NO: | (full | KASGYTFTSYYMHWVRQAPGQGLEWMGIINPSGGSTSYAQKFQG |
| 1459 | CAR) | RVTMTRDTSTSTVYMELSNLRSEDTAVYYCARSPRVTTGYFDYWG |
| | | QGTLVTVSSGGGGSGGGGSGGGGSGGGGSDIQLTQSPSTLSASVGD |
| | | RVTITCRASQSISSWLAWYQQKPGKAPKLLIYKASSLESGVPSRFSG |
| | | SGSGTEFTLTISSLQPDDFATYYCQQYSSYPLTFGGGTRLEIKTTTPA |
| | | PRPPTPAPTIASQPLSLRPEACRPA |
| | | AGGAVHTRGLDFACDIYIWAPLAGTCGVLLLSLVITLYCKRGRKKL |
| | | LYIFKQPFMRPVQT |
| | | TQEEDGCSCRFPEEEEGGCELRVKFSRSADAPAYKQGQNQLYNEL |
| | | NLGRREEYDVLDKRR |
| | | GRDPEMGGKPRRKNPQEGLYNELQKDKMAEAYSEIGMKGERRRG |
| | | KGHDGLYQGLSTATKD |
| | | TYDALHMQALPPR |
| SEQ ID | M22 | QVQLVQSGAEVRRPGASVKISCRASGDTSTRHYIHWLRQAPGQGP |
| NO: | (ScFv | EWMGVINPTTGPATGSPAYAQMLQGRVTMTRDTSTRTVYMELRS |
| 1460 | domain) | LRFEDTAVYYCARSVVGRSAPYYFDYWGQGTLVTVSSGGGGSGG |
| | | GGSGGGGSGGGGSDIQMTQSPSSLSASVGDRVTITCRASQGISDYS |
| | | AWYQQKPGKAPKLLIYAASTLQSGVPSRFSGSGSGTDFTLTISYLQS |
| | | EDFATYYCQQYYSYPLTFGGGTKVDIK |
| SEQ ID | M22 | MALPVTALLLPLALLLHAARPQVQLVQSGAEVRRPGASVKISCR |
| NO: | (full | ASGDTSTRHYIHWLRQAPGQGPEWMGVINPTTGPATGSPAYAQML |
| 1461 | CAR) | QGRVTMTRDTSTRTVYMELRSLRFEDTAVYYCARSVVGRSAPYYF |
| | | DYWGQGTLVTVSSGGGGSGGGGSGGGGSGGGGSDIQMTQSPSSLS |
| | | ASVGDRVTITCRASQGISDYSAWYQQKPGKAPKLLIYAASTLQSGV |
| | | PSRFSGSGSGTDFTLTISYLQSEDFATYYCQQYYSYPLTFGGGTKVD |
| | | IKTTTPAPRPPTPAPTIASQPLSLRPEACRPA |
| | | AGGAVHTRGLDFACDIYIWAPLAGTCGVLLLSLVITLYCKRGRKKL |
| | | LYIFKQPFMRPVQT |
| | | TQEEDGCSCRFPEEEEGGCELRVKFSRSADAPAYKQGQNQLYNEL |
| | | NLGRREEYDVLDKRR |
| | | GRDPEMGGKPRRKNPQEGLYNELQKDKMAEAYSEIGMKGERRRG |
| | | KGHDGLYQGLSTATKD |
| | | TYDALHMQALPPR |
| SEQ ID | M23 | QVQLQQSGAEVKKPGASVKVSCKASGYTFTNYYMHWVRQAPGQ |
| NO: | (ScFv | GLEWMGIINPSGGYTTYAQKFQGRLTMTRDTSTSTVYMELSSLRSE |
| 1462 | domain) | DTAVYYCARIRSCGGDCYYFDNWGQGTLVTVSSGGGGSGGGGSG |
| | | GGGSGGGGSDIQLTQSPSTLSASVGDRVTITCRASENVNIWLAWYQ |
| | | QKPGKAPKLLIYKSSSLASGVPSRFSGSGSGAEFTLTISSLQPDDFAT |
| | | YYCQQYQSYPLTFGGGTKVDIK |
| SEQ ID | M23 | MALPVTALLLPLALLLHAARPQVQLQQSGAEVKKPGASVKVSCK |
| NO: | (full | ASGYTFTNYYMHWVRQAPGQGLEWMGIINPSGGYTTYAQKFQGR |
| 1463 | CAR) | LTMTRDTSTSTVYMELSSLRSEDTAVYYCARIRSCGGDCYYFDNW |
| | | GQGTLVTVSSGGGGSGGGGSGGGGSGGGGSDIQLTQSPSTLSASVG |
| | | DRVTITCRASENVNIWLAWYQQKPGKAPKLLIYKSSSLASGVPSRF |
| | | SGSGSGAEFTLTISSLQPDDFATYYCQQYQSYPLTFGGGTKVDIKTT |
| | | TPAPRPPTPAPTIASQPLSLRPEACRPA |
| | | AGGAVHTRGLDFACDIYIWAPLAGTCGVLLLSLVITLYCKRGRKKL |
| | | LYIFKQPFMRPVQT |
| | | TQEEDGCSCRFPEEEEGGCELRVKFSRSADAPAYKQGQNQLYNEL |
| | | NLGRREEYDVLDKRR |
| | | GRDPEMGGKPRRKNPQEGLYNELQKDKMAEAYSEIGMKGERRRG |
| | | KGHDGLYQGLSTATKD |
| | | TYDALHMQALPPR |
| SEQ ID | M24 | QITLKESGPALVKPTQTLTLTCTFSGFSLSTAGVHVGWIRQPPGKAL |
| NO: | (ScFv | EWLALISWADDKRYRPSLRSRLDITRVTSKDQVVLSMTNMQPEDT |
| 1464 | domain) | ATYYCALQGFDGYEANWGPGTLVTVSSGGGGSGGGGSGGGGSGG |
| | | GGSDIVMTQSPSSLSASAGDRVTITCRASRGISSALAWYQQKPGKPP |
| | | KLLIYDASSLESGVPSRFSGSGSGTDFTLTIDSLEPEDFATYYCQQSY |
| | | STPWTFGQGTKVDIK |
| SEQ ID | M24 | MALPVTALLLPLALLLHAARPQITLKESGPALVKPTQTLTLTCTFS |
| NO: | (full | GFSLSTAGVHVGWIRQPPGKALEWLALISWADDKRYRPSLRSRLDI |
| 1465 | CAR) | TRVTSKDQVVLSMTNMQPEDTATYYCALQGFDGYEANWGPGTLV |
| | | TVSSGGGGSGGGGSGGGGSGGGGSDIVMTQSPSSLSASAGDRVTIT |
| | | CRASRGISSALAWYQQKPGKPPKLLIYDASSLESGVPSRFSGSGSGT |
| | | DFTLTIDSLEPEDFATYYCQQSYSTPWTFGQGTKVDIKTTTPAPRPP |
| | | TPAPTIASQPLSLRPEACRPA |
| | | AGGAVHTRGLDFACDIYIWAPLAGTCGVLLLSLVITLYCKRGRKKL |
| | | LYIFKQPFMRPVQT |
| | | TQEEDGCSCRFPEEEEGGCELRVKFSRSADAPAYKQGQNQLYNEL |
| | | NLGRREEYDVLDKRR |
| | | GRDPEMGGKPRRKNPQEGLYNELQKDKMAEAYSEIGMKGERRRG |
| | | KGHDGLYQGLSTATKD |
| | | TYDALHMQALPPR |
| SEQ ID | Ss1 | QVQLQQSGPELEKPGASVKISCKASGYSFTGYTMNWVKQSHGKSL |
| NO: | (scFv | EWIGLITPYNGASS |
| 1466 | domain) | YNQKFRGKATLTVDKSSSTAYMDLLSLTSEDSAVYFCARGGYDGR |
| | | GFDYWGQGTTVTVS |
| | | SGGGGSGGGGSGGGGSDIELTQSPAIMSASPGEKVTMTCSASSSVS |
| | | YMHWYQQKSGTSP |
| | | KRWIYDTSKLASGVPGRFSGSGSGNSYSLTISSVEAEDDATYYCQQ |
| | | WSGYPLTFGAGTK |
| | | LEI |
| SEQ ID | Ss1 (full | MALPVTALLLPLALLLHAARPQVQLQQSGPELEKPGASVKISCKA |
| NO: | CAR) | SGYSFTGYTMNWVK |
| 1467 | | QSHGKSLEWIGLITPYNGASSYNQKFRGKATLTVDKSSSTAYMDLL |
| | | SLTSEDSAVYFCA |
| | | RGGYDGRGFDYWGQGTTVTVSSGGGGSGGGGSGGGGSDIELTQSP |
| | | AIMSASPGEKVTMT |
| | | CSASSSVSYMHWYQQKSGTSPKRWIYDTSKLASGVPGRFSGSGSG |
| | | NSYSLTISSVEAED |
| | | DATYYCQQWSGYPLTFGAGTKLEITTTPAPRPPTPAPTIASQPLSLR |
| | | PEACRPAAGGAV |
| | | HTRGLDFACDIYIWAPLAGTCGVLLLSLVITLYCKRGRKKLLYIFKQ |
| | | PFMRPVQTTQEE |
| | | DGCSCRFPEEEEGGCELRVKFSRSADAPA |

### CLL-1 CAR and CLL-1 Binding Sequences

[0420] In some embodiments, the TOX^{hi} CAR cell described herein is a CLL-1 CAR-expressing cell (e.g., a cell expressing a CAR that binds to human CLL-1). In other embodiments, the CLL-1 CAR can specifically bind to CLL-1, e.g., can include a CAR molecule, or an antigen binding domain according to Table 2 of WO2016/014535, incorporated herein by reference. The amino acid and nucleotide sequences encoding the CLL-1 CAR molecules and antigen binding domains (e.g., including one, two, three VH CDRs; and one, two, three VL CDRs according to Kabat or Chothia), as specified in WO2016/014535.

[0421] In embodiments, the CAR molecule comprises an antigen binding domain that binds specifically to CLL-1 (CLL-1 CAR). In some embodiments, the antigen binding domain targets human CLL-1. In some embodiments, the antigen binding domain includes a single chain Fv sequence as described herein. The sequences of human CLL-1 CAR are provided below.

TABLE 2
Amino Acid and Nucleic Acid Sequences of the anti-CLL-1 scFv domains and
CLL-1 CAR molecules

| | | |
|---|---|---|
| Name/ | SEQ | |
| Description | ID NO: | Sequence |

139115

| | | |
|---|---|---|
| 139115- aa | 2265 | EVQLQQSGAEVKKPGSSVKVSCKASGGTFSSYAISWVRQAPGQGLEWMGGIIPIFGTANYAQKFQ |
| ScFv domain | | GRVTITADESTSTAYMELSSLRSEDTAVYYCARDLEMATIMGGYWGQGTLVTVSSGGGGSGGGGS |
| CLL-1 CAR | | GGGGSQSALTQPASVSGSPGQSITISCTGTSSDVGGYNYVSWYQQHPGKAPKLMIYDVSNRPSGV |
| 1 | | SNRFSGSKSGNTASLTISGLQAEDEADYYCSSYTSSSTLDVVFGGGTKLTVL |
| 139115- nt | 2266 | GAAGTGCAACTCCAACAGTCAGGCGCAGAAGTCAAGAAGCCCGGATCGTCAGTGAAAGTGTCCTG |
| ScFv domain | | CAAAGCCTCCGGCGGAACCTTCAGCTCCTACGCAATCAGCTGGGTGCGGCAGGCGCCCGGACAGG |
| CLL-1 CAR | | GACTGGAGTGGATGGGCGGTATCATTCCGATCTTTGGCACCGCCAATTACGCCCAGAAGTTCCAG |
| 1 | | GGACGCGTCACAATCACCGCCGACGAATCGACTTCCACCGCCTACATGGAGCTGTCGTCCTTGAG |
| | | GAGCGAAGATACCGCCGTGTACTACTGCGCTCGGGATCTGGAGATGGCCACTATCATGGGGGGTT |
| | | ACTGGGGCCAGGGGACCCTGGTCACTGTGTCCTCGGGAGGAGGGGGATCAGGCGGCGGCGGTTCC |
| | | GGGGGAGGAGGAAGCCAGTCCGCGCTGACTCAGCCAGCTTCCGTGTCTGGTTCGCCGGGACAGTC |
| | | CATCACTATTAGCTGTACCGGCACCAGCAGCGACGTGGGCGGCTACAACTATGTGTCATGGTACC |
| | | AGCAGCACCCGGGGAAGGCGCCTAAGCTGATGATCTACGACGTGTCCAACCGCCCTAGCGGAGTG |
| | | TCCAACAGATTCTCCGGTTCGAAGTCAGGGAACACTGCCTCCCTCACGATTAGCGGGCTGCAAGC |
| | | CGAGGATGAAGCCGACTACTACTGCTCCTCCTATACCTCCTCCTCGACCCTGGACGTGGTGTTCG |
| | | GAGGAGGCACCAAGCTCACCGTCCTT |
| 139115- aa | 2267 | EVQLQQSGAEVKKPGSSVKVSCKASGGTFSSYAISWVRQAPGQGLEWMGGIIPIFGTANYAQKFQ |
| VH of ScFv | | GRVTITADESTSTAYMELSSLRSEDTAVYYCARDLEMATIMGGYWGQGTLVTVSS |
| CLL-1 CAR | | |
| 1 | | |
| 139115- aa | 2268 | QSALTQPASVSGSPGQSITISCTGTSSDVGGYNYVSWYQQHPGKAPKLMIYDVSNRPSGVSNRFS |
| VL OF ScFv | | GSKSGNTASLTISGLQAEDEADYYCSSYTSSSTLDVVFGGGTKLTVL |
| CLL-1 CAR | | |
| 1 | | |
| 139115- aa | 2269 | MALPVTALLLPLALLLHAARPEVQLQQSGAEVKKPGSSVKVSCKASGGTFSSYAISWVRQAPGQG |
| Full CAR | | LEWMGGIIPIFGTANYAQKFQGRVTITADESTSTAYMELSSLRSEDTAVYYCARDLEMATIMGGY |
| CLL-1 CAR | | WGQGTLVTVSSGGGGSGGGGSGGGGSQSALTQPASVSGSPGQSITISCTGTSSDVGGYNYVSWYQ |
| 1 | | QHPGKAPKLMIYDVSNRPSGVSNRFSGSKSGNTASLTISGLQAEDEADYYCSSYTSSSTLDVVFG |
| | | GGTKLTVLTTTPAPRPPTPAPTIASQPLSLRPEACRPAAGGAVHTRGLDFACDIYIWAPLAGTCG |
| | | VLLLSLVITLYCKRGRKKLLYIFKQPFMRPVQTTQEEDGCSCRFPEEEEGGCELRVKFSRSADAP |
| | | AYKQGQNQLYNELNLGRREEYDVLDKRRGRDPEMGGKPRRKNPQEGLYNELQKDKMAEAYSEIGM |
| | | KGERRRGKGHDGLYQGLSTATKDTYDALHMQALPPR |
| 139115- nt | 2270 | ATGGCCCTCCCTGTCACCGCCCTGCTGCTTCCGCTGGCTCTTCTGCTCCACGCCGCTCGGCCCGA |
| Full CAR | | AGTGCAACTCCAACAGTCAGGCGCAGAAGTCAAGAAGCCCGGATCGTCAGTGAAAGTGTCCTGCA |
| CLL-1 CAR | | AAGCCTCCGGCGGAACCTTCAGCTCCTACGCAATCAGCTGGGTGCGGCAGGCGCCCGGACAGGGA |
| 1 | | CTGGAGTGGATGGGCGGTATCATTCCGATCTTTGGCACCGCCAATTACGCCCAGAAGTTCCAGGG |
| | | ACGCGTCACAATCACCGCCGACGAATCGACTTCCACCGCCTACATGGAGCTGTCGTCCTTGAGGA |
| | | GCGAAGATACCGCCGTGTACTACTGCGCTCGGGATCTGGAGATGGCCACTATCATGGGGGGTTAC |
| | | TGGGGCCAGGGGACCCTGGTCACTGTGTCCTCGGGAGGAGGGGGATCAGGCGGCGGCGGTTCCGG |
| | | GGGAGGAGGAAGCCAGTCCGCGCTGACTCAGCCAGCTTCCGTGTCTGGTTCGCCGGGACAGTCCA |
| | | TCACTATTAGCTGTACCGGCACCAGCAGCGACGTGGGCGGCTACAACTATGTGTCATGGTACCAG |
| | | CAGCACCCGGGGAAGGCGCCTAAGCTGATGATCTACGACGTGTCCAACCGCCCTAGCGGAGTGTC |
| | | CAACAGATTCTCCGGTTCGAAGTCAGGGAACACTGCCTCCCTCACGATTAGCGGGCTGCAAGCCG |
| | | AGGATGAAGCCGACTACTACTGCTCCTCCTATACCTCCTCCTCGACCCTGGACGTGGTGTTCGGA |
| | | GGAGGCACCAAGCTCACCGTCCTTACCACTACCCCAGCACCGAGGCCACCCACCCCGGCTCCTAC |
| | | CATCGCCTCCCAGCCTCTGTCCCTGCGTCCGGAGGCATGTAGACCCGCAGCTGGTGGGGCCGTGC |
| | | ATACCCGGGGTCTTGACTTCGCCTGCGATATCTACATTTGGGCCCCTCTGGCTGGTACTTGCGGG |
| | | GTCCTGCTGCTTTCACTCGTGATCACTCTTTACTGTAAGCGCGGTCGGAAGAAGCTGCTGTACAT |
| | | CTTTAAGCAACCCTTCATGAGGCCTGTGCAGACTACTCAAGAGGAGGACGGCTGTTCATGCCGGT |
| | | TCCCAGAGGAGGAGGAAGGCGGCTGCGAACTGCGCGTGAAATTCAGCCGCAGCGCAGATGCTCCA |
| | | GCCTACAAGCAGGGGCAGAACCAGCTCTACAACGAACTCAATCTTGGTCGGAGAGAGGAGTACGA |
| | | CGTGCTGGACAAGCGGAGAGGACGGGACCCAGAAATGGGCGGGAAGCCGCGCAGAAAGAATCCCC |
| | | AAGAGGGCCTGTACAACGAGCTCCAAAAGGATAAGATGGCAGAAGCCTATAGCGAGATTGGTATG |
| | | AAAGGGGAACGCAGAAGAGGCAAAGGCCACGACGGACTGTACCAGGGACTCAGCACCGCCACCAA |
| | | GGACACCTATGACGCTCTTCACATGCAGGCCCTGCCGCCTCGG |

139116

| | | |
|---|---|---|
| 139116- aa | 2271 | EVQLVESGGGVVQPGGSLRLSCAASGFTFDDYAMHWVRQAPGKGLEWVSLISGDGGSTYYADSVK |
| ScFv domain | | GRFTISRDNSKNTLYLQMNSLRVEDTAVYYCARVFDSYYMDVWGKGTTVTVSSGGGGSGGGGSGS |
| CLL-1 CAR | | GGSEIVLTQSPLSLPVTPGQPASISCRSSQSLVYTDGNTYLNWFQQRPGQSPRRLIYKVSNRDSG |
| 2 | | VPDRFSGSGSDTDFTLKISRVEAEDVGIYYCMQGTHWSFTFGQGTRLEIK |
| 139116- nt | 2272 | GAAGTGCAATTGGTGGAAAGCGGAGGAGGAGTGGTGCAACCTGGAGGAAGCCTGAGACTGTCATG |
| ScFv domain | | TGCCGCCTCGGGATTCACTTTCGATGACTACGCAATGCACTGGGTCCGCCAGGCCCCCGGAAAGG |
| | | GTCTGGAATGGGTGTCCCTCATCTCCGGCGATGGGGGTTCCACTTACTATGCGGATTCTGTGAAG |
| CLL-1 CAR | | GGCCGCTTCACAATCTCCCGGGACAATTCCAAGAACACTCTGTACCTTCAAATGAACTCCCTGAG |
| 2 | | GGTGGAGGACACCGCTGTGTACTACTGCGCGAGAGTGTTTGACTCGTACTATATGGACGTCTGGG |
| | | GAAAGGGCACCACCGTGACCGTGTCCAGCGGTGGCGGTGGATCGGGGGGCGGCGGCTCCGGGAGC |
| | | GGAGGTTCCGAGATTGTGCTGACTCAGTCGCCGTTGTCACTGCCTGTCACCCCCGGGCAGCCGGC |
| | | CTCCATTTCATGCCGGTCCAGCCAGTCCCTGGTCTACACCGATGGGAACACTTACCTCAACTGGT |
| | | TCCAGCAGCGCCCAGGACAGTCCCCGCGGAGGCTGATCTACAAAGTGTCAAACCGGGACTCCGGC |
| | | GTCCCCGATCGGTTCTCGGGAAGCGGCAGCGACACCGACTTCACGCTGAAGATTTCCCGCGTGGA |
| | | AGCCGAGGACGTGGGCATCTACTACTGTATGCAGGGCACCCACTGGTCGTTTACCTTCGGACAAG |
| | | GAACTAGGCTCGAGATCAAG |
| 139116- aa | 2273 | EVQLVESGGGVVQPGGSLRLSCAASGFTFDDYAMHWVRQAPGKGLEWVSLISGDGGSTYYADSVK |
| VH of ScFv | | GRFTISRDNSKNTLYLQMNSLRVEDTAVYYCARVFDSYYMDVWGKGTTVTVSS |
| CLL-1 CAR | | |
| 2 | | |
| 139116- aa | 2274 | EIVLTQSPLSLPVTPGQPASISCRSSQSLVYTDGNTYLNWFQQRPGQSPRRLIYKVSNRDSGVPD |
| VL of ScFv | | RFSGSGSDTDFTLKISRVEAEDVGIYYCMQGTHWSFTFGQGTRLEIK |
| CLL-1 CAR | | |
| 2 | | |
| 139116- aa | 2275 | MALPVTALLLPLALLLHAARPEVQLVESGGGVVQPGGSLRLSCAASGFTFDDYAMHWVRQAPGKG |
| Full CAR | | LEWVSLISGDGGSTYYADSVKGRFTISRDNSKNTLYLQMNSLRVEDTAVYYCARVFDSYYMDVWG |
| CLL-1 CAR | | KGTTVTVSSGGGGSGGGGSGSGGSEIVLTQSPLSLPVTPGQPASISCRSSQSLVYTDGNTYLNWF |
| 2 | | QQRPGQSPRRLIYKVSNRDSGVPDRFSGSGSDTDFTLKISRVEAEDVGIYYCMQGTHWSFTFGQG |
| | | TRLEIKTTTPAPRPPTPAPTIASQPLSLRPEACRPAAGGAVHTRGLDFACDIYIWAPLAGTCGVL |
| | | LLSLVITLYCKRGRKKLLYIFKQPFMRPVQTTQEEDGCSCRFPEEEEGGCELRVKFSRSADAPAY |
| | | KQGQNQLYNELNLGRREEYDVLDKRRGRDPEMGGKPRRKNPQEGLYNELQKDKMAEAYSEIGMKG |
| | | ERRRGKGHDGLYQGLSTATKDTYDALHMQALPPR |
| 139116- nt | 2276 | ATGGCCCTCCCTGTCACCGCCCTGCTGCTTCCGCTGGCTCTTCTGCTCCACGCCGCTCGGCCCGA |
| Full CAR | | AGTGCAATTGGTGGAAAGCGGAGGAGGAGTGGTGCAACCTGGAGGAAGCCTGAGACTGTCATGTG |
| CLL-1 CAR | | CCGCCTCGGGATTCACTTTCGATGACTACGCAATGCACTGGGTCCGCCAGGCCCCCGGAAAGGGT |
| 2 | | CTGGAATGGGTGTCCCTCATCTCCGGCGATGGGGGTTCCACTTACTATGCGGATTCTGTGAAGGG |
| | | CCGCTTCACAATCTCCCGGGACAATTCCAAGAACACTCTGTACCTTCAAATGAACTCCCTGAGGG |
| | | TGGAGGACACCGCTGTGTACTACTGCGCGAGAGTGTTTGACTCGTACTATATGGACGTCTGGGGA |
| | | AAGGGCACCACCGTGACCGTGTCCAGCGGTGGCGGTGGATCGGGGGGCGGCGGCTCCGGGAGCGG |
| | | AGGTTCCGAGATTGTGCTGACTCAGTCGCCGTTGTCACTGCCTGTCACCCCCGGGCAGCCGGCCT |
| | | CCATTTCATGCCGGTCCAGCCAGTCCCTGGTCTACACCGATGGGAACACTTACCTCAACTGGTTC |
| | | CAGCAGCGCCCAGGACAGTCCCCGCGGAGGCTGATCTACAAAGTGTCAAACCGGGACTCCGGCGT |
| | | CCCCGATCGGTTCTCGGGAAGCGGCAGCGACACCGACTTCACGCTGAAGATTTCCCGCGTGGAAG |
| | | CCGAGGACGTGGGCATCTACTACTGTATGCAGGGCACCCACTGGTCGTTTACCTTCGGACAAGGA |
| | | ACTAGGCTCGAGATCAAGACCACTACCCCAGCACCGAGGCCACCCACCCCGGCTCCTACCATCGC |
| | | CTCCCAGCCTCTGTCCCTGCGTCCGGAGGCATGTAGACCCGCAGCTGGTGGGGCCGTGCATACCC |
| | | GGGGTCTTGACTTCGCCTGCGATATCTACATTTGGGCCCCTCTGGCTGGTACTTGCGGGGTCCTG |
| | | CTGCTTTCACTCGTGATCACTCTTTACTGTAAGCGCGGTCGGAAGAAGCTGCTGTACATCTTTAA |
| | | GCAACCCTTCATGAGGCCTGTGCAGACTACTCAAGAGGAGGACGGCTGTTCATGCCGGTTCCCAG |
| | | AGGAGGAGGAAGGCGGCTGCGAACTGCGCGTGAAATTCAGCCGCAGCGCAGATGCTCCAGCCTAC |
| | | AAGCAGGGGCAGAACCAGCTCTACAACGAACTCAATCTTGGTCGGAGAGAGGAGTACGACGTGCT |
| | | GGACAAGCGGAGAGGACGGGACCCAGAAATGGGCGGGAAGCCGCGCAGAAAGAATCCCCAAGAGG |
| | | GCCTGTACAACGAGCTCCAAAAGGATAAGATGGCAGAAGCCTATAGCGAGATTGGTATGAAAGGG |
| | | GAACGCAGAAGAGGCAAAGGCCACGACGGACTGTACCAGGGACTCAGCACCGCCACCAAGGACAC |
| | | CTATGACGCTCTTCACATGCAGGCCCTGCCGCCTCGG |

139118

| | | |
|---|---|---|
| 139118- aa | 2277 | QVQLQESGPGLVKPSETLSLTCTVSGGSISSSSYYWGWIRQPPGKGLEWIGSIYYSGSTYYNPSL |
| ScFv domain | | KSRVSISVDTSKNQFSLKLKYVTAADTAVYYCATPGTYYDFLSGYYPFYWGQGTLVTVSSGGGGS |
| CLL-1 CAR | | GGGGSGGGGSDIVMTQSPSSLSASVGDRVTITCRASQGISSYLAWYQQKPGKAPKLLIYAASTLQ |
| 3 | | SGVPSRFSGSGSGTDFTLTISSLQPEDFATYYCQQLNSYPYTFGQGTKLEIK |
| 139118- nt | 2278 | CAAGTGCAGCTTCAAGAAAGCGGTCCAGGACTCGTCAAGCCATCAGAAACTCTTTCCCTCACTTG |
| ScFv domain | | TACCGTGTCGGGAGGCAGCATCTCCTCGAGCTCCTACTACTGGGGTTGGATTAGACAGCCCCCGG |
| CLL-1 CAR | | GAAAGGGGTTGGAGTGGATCGGTTCCATCTACTACTCCGGGTCGACCTACTACAACCCTTCCCTG |
| 3 | | AAATCTCGGGTGTCCATCTCCGTCGACACCTCCAAGAACCAGTTCAGCCTGAAGCTGAAATATGT |
| | | GACCGCGGCCGATACTGCCGTGTACTATTGCGCCACCCCGGGAACCTACTACGACTTCCTCTCGG |
| | | GGTACTACCCGTTTTACTGGGGACAGGGGACTCTCGTGACCGTGTCCTCGGGCGGCGGAGGTTCA |
| | | GGCGGTGGCGGATCGGGGGGAGGAGGCTCAGACATTGTGATGACCCAGAGCCCGTCCAGCCTGAG |
| | | CGCCTCCGTGGGCGATAGGGTCACGATTACTTGCCGGGCGTCCCAGGGAATCTCAAGCTACCTGG |
| | | CCTGGTACCAACAGAAGCCCGGAAAGGCACCCAAGTTGCTGATCTATGCCGCTAGCACTCTGCAG |
| | | TCCGGGGTGCCTTCCCGCTTCTCCGGCTCCGGCTCGGGCACCGACTTCACCCTGACCATTTCCTC |
| | | ACTGCAACCCGAGGACTTCGCCACTTACTACTGCCAGCAGCTGAACTCCTACCCTTACACATTCG |
| | | GACAGGGAACCAAGCTGGAAATCAAG |
| 139118- aa | 2279 | QVQLQESGPGLVKPSETLSLTCTVSGGSISSSSYYWGWIRQPPGKGLEWIGSIYYSGSTYYNPSL |
| VH of ScFv | | KSRVSISVDTSKNQFSLKLKYVTAADTAVYYCATPGTYYDFLSGYYPFYWGQGTLVTVSS |
| CLL-1 CAR | | |
| 3 | | |
| 139118- aa | 2280 | DIVMTQSPSSLSASVGDRVTITCRASQGISSYLAWYQQKPGKAPKLLIYAASTLQSGVPSRFSGS |
| VL of ScFv | | GSGTDFTLTISSLQPEDFATYYCQQLNSYPYTFGQGTKLEIK |
| CLL-1 CAR | | |
| 3 | | |
| 139118- aa | 2281 | MALPVTALLLPLALLLHAARPQVQLQESGPGLVKPSETLSLTCTVSGGSISSSSYYWGWIRQPPG |
| Full CAR | | KGLEWIGSIYYSGSTYYNPSLKSRVSISVDTSKNQFSLKLKYVTAADTAVYYCATPGTYYDFLSG |
| CLL-1 CAR | | YYPFYWGQGTLVTVSSGGGGSGGGGSGGGGSDIVMTQSPSSLSASVGDRVTITCRASQGISSYLA |
| 3 | | WYQQKPGKAPKLLIYAASTLQSGVPSRFSGSGSGTDFTLTISSLQPEDFATYYCQQLNSYPYTFG |
| | | QGTKLEIKTTTPAPRPPTPAPTIASQPLSLRPEACRPAAGGAVHTRGLDFACDIYIWAPLAGTCG |
| | | VLLLSLVITLYCKRGRKKLLYIFKQPFMRPVQTTQEEDGCSCRFPEEEEGGCELRVKFSRSADAP |
| | | AYKQGQNQLYNELNLGRREEYDVLDKRRGRDPEMGGKPRRKNPQEGLYNELQKDKMAEAYSEIGM |
| | | KGERRRGKGHDGLYQGLSTATKDTYDALHMQALPPR |
| 139118- nt | 2282 | ATGGCCCTCCCTGTCACCGCCCTGCTGCTTCCGCTGGCTCTTCTGCTCCACGCCGCTCGGCCCCA |
| Full CAR | | AGTGCAGCTTCAAGAAAGCGGTCCAGGACTCGTCAAGCCATCAGAAACTCTTTCCCTCACTTGTA |
| CLL-1 CAR | | CCGTGTCGGGAGGCAGCATCTCCTCGAGCTCCTACTACTGGGGTTGGATTAGACAGCCCCCGGGA |
| 3 | | AAGGGGTTGGAGTGGATCGGTTCCATCTACTACTCCGGGTCGACCTACTACAACCCTTCCCTGAA |
| | | ATCTCGGGTGTCCATCTCCGTCGACACCTCCAAGAACCAGTTCAGCCTGAAGCTGAAATATGTGA |
| | | CCGCGGCCGATACTGCCGTGTACTATTGCGCCACCCCGGGAACCTACTACGACTTCCTCTCGGGG |
| | | TACTACCCGTTTTACTGGGGACAGGGGACTCTCGTGACCGTGTCCTCGGGCGGCGGAGGTTCAGG |
| | | CGGTGGCGGATCGGGGGGAGGAGGCTCAGACATTGTGATGACCCAGAGCCCGTCCAGCCTGAGCG |
| | | CCTCCGTGGGCGATAGGGTCACGATTACTTGCCGGGCGTCCCAGGGAATCTCAAGCTACCTGGCC |
| | | TGGTACCAACAGAAGCCCGGAAAGGCACCCAAGTTGCTGATCTATGCCGCTAGCACTCTGCAGTC |
| | | CGGGGTGCCTTCCCGCTTCTCCGGCTCCGGCTCGGGCACCGACTTCACCCTGACCATTTCCTCAC |
| | | TGCAACCCGAGGACTTCGCCACTTACTACTGCCAGCAGCTGAACTCCTACCCTTACACATTCGGA |
| | | CAGGGAACCAAGCTGGAAATCAAGACCACTACCCCAGCACCGAGGCCACCCACCCCGGCTCCTAC |
| | | CATCGCCTCCCAGCCTCTGTCCCTGCGTCCGGAGGCATGTAGACCCGCAGCTGGTGGGGCCGTGC |
| | | ATACCCGGGGTCTTGACTTCGCCTGCGATATCTACATTTGGGCCCCTCTGGCTGGTACTTGCGGG |
| | | GTCCTGCTGCTTTCACTCGTGATCACTCTTTACTGTAAGCGCGGTCGGAAGAAGCTGCTGTACAT |
| | | CTTTAAGCAACCCTTCATGAGGCCTGTGCAGACTACTCAAGAGGAGGACGGCTGTTCATGCCGGT |
| | | TCCCAGAGGAGGAGGAAGGCGGCTGCGAACTGCGCGTGAAATTCAGCCGCAGCGCAGATGCTCCA |
| | | GCCTACAAGCAGGGGCAGAACCAGCTCTACAACGAACTCAATCTTGGTCGGAGAGAGGAGTACGA |
| | | CGTGCTGGACAAGCGGAGAGGACGGGACCCAGAAATGGGCGGGAAGCCGCGCAGAAAGAATCCCC |
| | | AAGAGGGCCTGTACAACGAGCTCCAAAAGGATAAGATGGCAGAAGCCTATAGCGAGATTGGTATG |
| | | AAAGGGGAACGCAGAAGAGGCAAAGGCCACGACGGACTGTACCAGGGACTCAGCACCGCCACCAA |
| | | GGACACCTATGACGCTCTTCACATGCAGGCCCTGCCGCCTCGG |

139122

| | | |
|---|---|---|
| 139122- aa | 2283 | QVQLVESGGGLVQPGGSLRLSCAASGFTFSSYWMSWVRQAPGKGLEWVANINEDGSAKFYVDSVK |
| ScFv domain | | GRFTISRDNAKNSLYLQMNSLRAEDTAVYFCARDLRSGRYWGQGTLVTVSSGGGGSGGGGSGGGG |
| CLL-1 CAR | | SEIVLTQSPGTLSLSPGGRATLSCRASQSISGSFLAWYQQKPGQAPRLLIYGASSRATGIPDRFS |
| 4 | | GSGSGTDFTLTISRLEPEDFAVYYCQQYGSSPPTFGLGTKLEIK |
| 139122- nt | 2284 | CAAGTGCAACTCGTGGAATCTGGTGGAGGACTCGTGCAACCCGGAGGATCATTGCGACTCTCGTG |
| ScFv domain | | TGCGGCATCCGGCTTTACCTTTTCATCCTACTGGATGTCCTGGGTCAGACAGGCCCCCGGGAAGG |
| CLL-1 CAR | | GACTGGAATGGGTCGCGAACATCAACGAGGACGGCTCGGCCAAGTTCTACGTGGACTCCGTGAAG |
| 4 | | GGCCGCTTCACGATCTCACGGGATAACGCCAAGAATTCCCTGTATCTGCAAATGAACAGCCTGAG |
| | | GGCCGAGGACACTGCGGTGTACTTCTGCGCACGCGACCTGAGGTCCGGGAGATACTGGGGACAGG |
| | | GCACCCTCGTGACCGTGTCGAGCGGAGGAGGGGGGTCGGGCGGCGGCGGTTCCGGTGGCGGCGGT |
| | | AGCGAAATTGTGTTGACCCAGTCCCCTGGAACCCTGAGCCTGTCACCTGGAGGACGCGCCACCCT |
| | | GTCCTGCCGGGCCAGCCAGAGCATCTCAGGGTCCTTCCTGGCTTGGTACCAGCAGAAGCCGGGAC |
| | | AGGCTCCGAGACTTCTGATCTACGGCGCCTCCTCGCGGGCGACCGGAATCCCGGATCGGTTCTCC |
| | | GGCTCGGGAAGCGGAACTGACTTCACTCTTACCATTTCCCGCCTGGAGCCGGAAGATTTCGCCGT |
| | | GTACTACTGCCAGCAGTACGGGTCATCCCCTCCAACCTTCGGCCTGGGAACTAAGCTGGAAATCA |
| | | AA |
| 139122- aa | 2285 | QVQLVESGGGLVQPGGSLRLSCAASGFTFSSYWMSWVRQAPGKGLEWVANINEDGSAKFYVDSVK |
| VH of ScFv | | GRFTISRDNAKNSLYLQMNSLRAEDTAVYFCARDLRSGRYWGQGTLVTVSS |
| CLL-1 CAR | | |
| 4 | | |
| 139122- aa | 2286 | EIVLTQSPGTLSLSPGGRATLSCRASQSISGSFLAWYQQKPGQAPRLLIYGASSRATGIPDRFSG |
| VL of ScFv | | SGSGTDFTLTISRLEPEDFAVYYCQQYGSSPPTFGLGTKLEIK |
| CLL-1 CAR | | |
| 4 | | |
| 139122- aa | 2287 | MALPVTALLLPLALLLHAARPQVQLVESGGGLVQPGGSLRLSCAASGFTFSSYWMSWVRQAPGKG |
| Full CAR | | LEWVANINEDGSAKFYVDSVKGRFTISRDNAKNSLYLQMNSLRAEDTAVYFCARDLRSGRYWGQG |
| CLL-1 CAR | | TLVTVSSGGGGSGGGGSGGGGSEIVLTQSPGTLSLSPGGRATLSCRASQSISGSFLAWYQQKPGQ |
| 4 | | APRLLIYGASSRATGIPDRFSGSGSGTDFTLTISRLEPEDFAVYYCQQYGSSPPTFGLGTKLEIK |
| | | TTTPAPRPPTPAPTIASQPLSLRPEACRPAAGGAVHTRGLDFACDIYIWAPLAGTCGVLLLSLVI |
| | | TLYCKRGRKKLLYIFKQPFMRPVQTTQEEDGCSCRFPEEEEGGCELRVKFSRSADAPAYKQGQNQ |
| | | LYNELNLGRREEYDVLDKRRGRDPEMGGKPRRKNPQEGLYNELQKDKMAEAYSEIGMKGERRRGK |
| | | GHDGLYQGLSTATKDTYDALHMQALPPR |
| 139122- nt | 2288 | ATGGCCCTCCCTGTCACCGCCCTGCTGCTTCCGCTGGCTCTTCTGCTCCACGCCGCTCGGCCCCA |
| Full CAR | | AGTGCAACTCGTGGAATCTGGTGGAGGACTCGTGCAACCCGGAGGATCATTGCGACTCTCGTGTG |
| CLL-1 CAR | | CGGCATCCGGCTTTACCTTTTCATCCTACTGGATGTCCTGGGTCAGACAGGCCCCCGGGAAGGGA |
| 4 | | CTGGAATGGGTCGCGAACATCAACGAGGACGGCTCGGCCAAGTTCTACGTGGACTCCGTGAAGGG |
| | | CCGCTTCACGATCTCACGGGATAACGCCAAGAATTCCCTGTATCTGCAAATGAACAGCCTGAGGG |
| | | CCGAGGACACTGCGGTGTACTTCTGCGCACGCGACCTGAGGTCCGGGAGATACTGGGGACAGGGC |
| | | ACCCTCGTGACCGTGTCGAGCGGAGGAGGGGGGTCGGGCGGCGGCGGTTCCGGTGGCGGCGGTAG |
| | | CGAAATTGTGTTGACCCAGTCCCCTGGAACCCTGAGCCTGTCACCTGGAGGACGCGCCACCCTGT |
| | | CCTGCCGGGCCAGCCAGAGCATCTCAGGGTCCTTCCTGGCTTGGTACCAGCAGAAGCCGGGACAG |
| | | GCTCCGAGACTTCTGATCTACGGCGCCTCCTCGCGGGCGACCGGAATCCCGGATCGGTTCTCCGG |
| | | CTCGGGAAGCGGAACTGACTTCACTCTTACCATTTCCCGCCTGGAGCCGGAAGATTTCGCCGTGT |
| | | ACTACTGCCAGCAGTACGGGTCATCCCCTCCAACCTTCGGCCTGGGAACTAAGCTGGAAATCAAA |
| | | ACCACTACCCCAGCACCGAGGCCACCCACCCCGGCTCCTACCATCGCCTCCCAGCCTCTGTCCCT |
| | | GCGTCCGGAGGCATGTAGACCCGCAGCTGGTGGGGCCGTGCATACCCGGGGTCTTGACTTCGCCT |
| | | GCGATATCTACATTTGGGCCCCTCTGGCTGGTACTTGCGGGGTCCTGCTGCTTTCACTCGTGATC |
| | | ACTCTTTACTGTAAGCGCGGTCGGAAGAAGCTGCTGTACATCTTTAAGCAACCCTTCATGAGGCC |
| | | TGTGCAGACTACTCAAGAGGAGGACGGCTGTTCATGCCGGTTCCCAGAGGAGGAGGAAGGCGGCT |
| | | GCGAACTGCGCGTGAAATTCAGCCGCAGCGCAGATGCTCCAGCCTACAAGCAGGGGCAGAACCAG |
| | | CTCTACAACGAACTCAATCTTGGTCGGAGAGAGGAGTACGACGTGCTGGACAAGCGGAGAGGACG |
| | | GGACCCAGAAATGGGCGGGAAGCCGCGCAGAAAGAATCCCCAAGAGGGCCTGTACAACGAGCTCC |
| | | AAAAGGATAAGATGGCAGAAGCCTATAGCGAGATTGGTATGAAAGGGGAACGCAGAAGAGGCAAA |
| | | GGCCACGACGGACTGTACCAGGGACTCAGCACCGCCACCAAGGACACCTATGACGCTCTTCACAT |
| | | GCAGGCCCTGCCGCCTCGG |

139117

| | | |
|---|---|---|
| 139117- aa | 2289 | EVQLQQSGPGLVRPSETLSLTCTVSGGPVRSGSHYWNWIRQPPGRGLEWIGYIYYSGSTNYNPSL |
| ScFv domain | | ENRVTISIDTSNNHFSLKLSSVTAADTALYFCARGTATFDWNFPFDSWGQGTLVTVSSGGGGSGG |
| CLL-1 CAR | | GGSGSGGSDIQMTQSPSSLSASIGDRVTITCRASQSISSYLNWYQQKPGKAPKLLIYAASSLQSG |
| 5 | | VPSRFSGSGSGTDFTLTISSLQPEDFATYYCQQSYSTPWTFGQGTKLEIK |
| 139117- nt | 2290 | GAAGTGCAACTCCAACAATCCGGTCCAGGACTCGTCAGACCCTCCGAAACTCTCTCGCTTACATG |
| ScFv domain | | CACTGTGTCCGGCGGCCCTGTGCGGTCCGGCTCTCATTACTGGAACTGGATTCGCCAGCCCCCGG |
| CLL-1 CAR | | GACGCGGACTGGAGTGGATCGGCTACATCTATTACTCGGGGTCGACTAACTACAACCCGAGCCTG |
| 5 | | GAAAATAGAGTGACCATCTCAATCGACACGTCCAACAACCACTTCTCGCTGAAGTTGTCCTCCGT |
| | | GACTGCCGCCGATACTGCCCTGTACTTCTGTGCTCGCGGAACCGCCACCTTCGACTGGAACTTCC |
| | | CTTTTGACTCATGGGGCCAGGGGACCCTTGTGACCGTGTCCAGCGGAGGAGGAGGCTCCGGTGGT |
| | | GGCGGGAGCGGTAGCGGCGGAAGCGACATCCAGATGACCCAGTCACCGTCCTCGCTGTCCGCATC |
| | | CATTGGGGATCGGGTCACTATTACTTGCCGGGCGTCCCAGTCCATCTCGTCCTACCTGAACTGGT |
| | | ATCAGCAGAAGCCAGGGAAAGCCCCCAAGCTGCTGATCTACGCGGCCAGCAGCCTGCAGTCAGGA |
| | | GTGCCTTCAAGGTTTAGCGGCAGCGGATCGGGAACCGACTTCACCCTGACCATTTCCTCCCTCCA |
| | | ACCCGAGGATTTCGCCACCTACTACTGCCAGCAGTCCTACTCCACCCCGTGGACCTTCGGACAGG |
| | | GAACCAAGCTGGAGATCAAG |
| 139117- aa | 2291 | EVQLQQSGPGLVRPSETLSLTCTVSGGPVRSGSHYWNWIRQPPGRGLEWIGYIYYSGSTNYNPSL |
| VH of ScFv | | ENRVTISIDTSNNHFSLKLSSVTAADTALYFCARGTATFDWNFPFDSWGQGTLVTVSS |
| CLL-1 CAR | | |
| 5 | | |
| 139117- aa | 2292 | DIQMTQSPSSLSASIGDRVTITCRASQSISSYLNWYQQKPGKAPKLLIYAASSLQSGVPSRFSGS |
| VL of ScFv | | GSGTDFTLTISSLQPEDFATYYCQQSYSTPWTFGQGTKLEIK |
| CLL-1 CAR | | |
| 5 | | |
| 139117- aa | 2293 | MALPVTALLLPLALLLHAARPEVQLQQSGPGLVRPSETLSLTCTVSGGPVRSGSHYWNWIRQPPG |
| Full CAR | | RGLEWIGYIYYSGSTNYNPSLENRVTISIDTSNNHFSLKLSSVTAADTALYFCARGTATFDWNFP |
| CLL-1 CAR | | FDSWGQGTLVTVSSGGGGSGGGGSGSGGSDIQMTQSPSSLSASIGDRVTITCRASQSISSYLNWY |
| 5 | | QQKPGKAPKLLIYAASSLQSGVPSRFSGSGSGTDFTLTISSLQPEDFATYYCQQSYSTPWTFGQG |
| | | TKLEIKTTTPAPRPPTPAPTIASQPLSLRPEACRPAAGGAVHTRGLDFACDIYIWAPLAGTCGVL |
| | | LLSLVITLYCKRGRKKLLYIFKQPFMRPVQTTQEEDGCSCRFPEEEEGGCELRVKFSRSADAPAY |
| | | KQGQNQLYNELNLGRREEYDVLDKRRGRDPEMGGKPRRKNPQEGLYNELQKDKMAEAYSEIGMKG |
| | | ERRRGKGHDGLYQGLSTATKDTYDALHMQALPPR |
| 139117- nt | 2294 | ATGGCCCTCCCTGTCACCGCCCTGCTGCTTCCGCTGGCTCTTCTGCTCCACGCCGCTCGGCCCGA |
| Full CAR | | AGTGCAACTCCAACAATCCGGTCCAGGACTCGTCAGACCCTCCGAAACTCTCTCGCTTACATGCA |
| CLL-1 CAR | | CTGTGTCCGGCGGCCCTGTGCGGTCCGGCTCTCATTACTGGAACTGGATTCGCCAGCCCCCGGGA |
| 5 | | CGCGGACTGGAGTGGATCGGCTACATCTATTACTCGGGGTCGACTAACTACAACCCGAGCCTGGA |
| | | AAATAGAGTGACCATCTCAATCGACACGTCCAACAACCACTTCTCGCTGAAGTTGTCCTCCGTGA |
| | | CTGCCGCCGATACTGCCCTGTACTTCTGTGCTCGCGGAACCGCCACCTTCGACTGGAACTTCCCT |
| | | TTTGACTCATGGGGCCAGGGGACCCTTGTGACCGTGTCCAGCGGAGGAGGAGGCTCCGGTGGTGG |
| | | CGGGAGCGGTAGCGGCGGAAGCGACATCCAGATGACCCAGTCACCGTCCTCGCTGTCCGCATCCA |
| | | TTGGGGATCGGGTCACTATTACTTGCCGGGCGTCCCAGTCCATCTCGTCCTACCTGAACTGGTAT |
| | | CAGCAGAAGCCAGGGAAAGCCCCCAAGCTGCTGATCTACGCGGCCAGCAGCCTGCAGTCAGGAGT |
| | | GCCTTCAAGGTTTAGCGGCAGCGGATCGGGAACCGACTTCACCCTGACCATTTCCTCCCTCCAAC |
| | | CCGAGGATTTCGCCACCTACTACTGCCAGCAGTCCTACTCCACCCCGTGGACCTTCGGACAGGGA |
| | | ACCAAGCTGGAGATCAAGACCACTACCCCAGCACCGAGGCCACCCACCCCGGCTCCTACCATCGC |
| | | CTCCCAGCCTCTGTCCCTGCGTCCGGAGGCATGTAGACCCGCAGCTGGTGGGGCCGTGCATACCC |
| | | GGGGTCTTGACTTCGCCTGCGATATCTACATTTGGGCCCCTCTGGCTGGTACTTGCGGGGTCCTG |
| | | CTGCTTTCACTCGTGATCACTCTTTACTGTAAGCGCGGTCGGAAGAAGCTGCTGTACATCTTTAA |
| | | GCAACCCTTCATGAGGCCTGTGCAGACTACTCAAGAGGAGGACGGCTGTTCATGCCGGTTCCCAG |
| | | AGGAGGAGGAAGGCGGCTGCGAACTGCGCGTGAAATTCAGCCGCAGCGCAGATGCTCCAGCCTAC |
| | | AAGCAGGGGCAGAACCAGCTCTACAACGAACTCAATCTTGGTCGGAGAGAGGAGTACGACGTGCT |
| | | GGACAAGCGGAGAGGACGGGACCCAGAAATGGGCGGGAAGCCGCGCAGAAAGAATCCCCAAGAGG |
| | | GCCTGTACAACGAGCTCCAAAAGGATAAGATGGCAGAAGCCTATAGCGAGATTGGTATGAAAGGG |
| | | GAACGCAGAAGAGGCAAAGGCCACGACGGACTGTACCAGGGACTCAGCACCGCCACCAAGGACAC |
| | | CTATGACGCTCTTCACATGCAGGCCCTGCCGCCTCGG |

139119

| | | |
|---|---|---|
| 139119- aa | 2295 | QVQLQESGAGLLKPSETLSLTCAVYGGSFSGYYWSWIRQPPGKGLEWVGEINHSGSTNYNPSLKS |
| ScFv domain | | RVTISVDTSKNQFSLKLSSVTAADTAVYYCARGSGLVVYAIRVGSGWFDYWGQGTLVTVSSGGGG |
| CLL-1 CAR | | SGGGDSGGGGSDIQMTQSPSSLSASVGDRVTITCRASQSISSYLNWYQQKPGKAPKLLMYAASSL |
| 6 | | QSGVPSRFSGSGSGTDFTLTISSLQPEDFATYYCQQSYSTPPWTFGQGTKVDIK |
| 139119- nt | 2296 | CAAGTGCAACTTCAAGAATCAGGCGCAGGACTTCTCAAGCCATCCGAAACACTCTCCCTCACTTG |
| ScFv domain | | CGCGGTGTACGGGGGAAGCTTCTCGGGATACTACTGGTCCTGGATTAGGCAGCCTCCCGGCAAAG |
| CLL-1 CAR | | GCCTGGAATGGGTCGGGGAGATCAACCACTCCGGTTCAACCAACTACAACCCGTCGCTGAAGTCC |
| 6 | | CGCGTGACCATTTCCGTGGACACCTCTAAGAATCAGTTCAGCCTGAAGCTCTCGTCCGTGACCGC |
| | | GGCGGACACCGCCGTCTACTACTGCGCTCGGGGATCAGGACTGGTGGTGTACGCCATCCGCGTGG |
| | | GCTCGGGCTGGTTCGATTACTGGGGCCAGGGAACCCTGGTCACTGTGTCGTCCGGCGGAGGAGGT |
| | | TCGGGGGGCGGAGACAGCGGTGGAGGGGGTAGCGACATCCAGATGACCCAGTCCCCGTCCTCGCT |
| | | GTCCGCCTCCGTGGGAGATAGAGTGACCATCACCTGTCGGGCATCCCAGAGCATTTCCAGCTACC |
| | | TGAACTGGTATCAGCAGAAGCCCGGAAAGGCCCCTAAGCTGTTGATGTACGCCGCCAGCAGCTTG |
| | | CAGTCGGGCGTGCCGAGCCGGTTTTCCGGTTCCGGCTCCGGGACTGACTTCACCCTGACTATCTC |
| | | ATCCCTGCAACCCGAGGACTTCGCCACTTATTACTGCCAGCAGTCCTACTCAACCCCTCCCTGGA |
| | | CGTTCGGACAGGGCACCAAGGTCGATATCAAG |
| 139119- aa | 2297 | QVQLQESGAGLLKPSETLSLTCAVYGGSFSGYYWSWIRQPPGKGLEWVGEINHSGSTNYNPSLKS |
| VH of ScFv | | RVTISVDTSKNQFSLKLSSVTAADTAVYYCARGSGLVVYAIRVGSGWFDYWGQGTLVTVSS |
| CLL-1 CAR | | |
| 6 | | |
| 139119- aa | 2298 | DIQMTQSPSSLSASVGDRVTITCRASQSISSYLNWYQQKPGKAPKLLMYAASSLQSGVPSRFSGS |
| VL of ScFv | | GSGTDFTLTISSLQPEDFATYYCQQSYSTPPWTFGQGTKVDIK |
| CLL-1 CAR | | |
| 6 | | |
| 139119- aa | 2299 | MALPVTALLLPLALLLHAARPQVQLQESGAGLLKPSETLSLTCAVYGGSFSGYYWSWIRQPPGKG |
| Full CAR | | LEWVGEINHSGSTNYNPSLKSRVTISVDTSKNQFSLKLSSVTAADTAVYYCARGSGLVVYAIRVG |
| CLL-1 CAR | | SGWFDYWGQGTLVTVSSGGGGSGGGDSGGGGSDIQMTQSPSSLSASVGDRVTITCRASQSISSYL |
| 6 | | NWYQQKPGKAPKLLMYAASSLQSGVPSRFSGSGSGTDFTLTISSLQPEDFATYYCQQSYSTPPWT |
| | | FGQGTKVDIKTTTPAPRPPTPAPTIASQPLSLRPEACRPAAGGAVHTRGLDFACDIYIWAPLAGT |
| | | CGVLLLSLVITLYCKRGRKKLLYIFKQPFMRPVQTTQEEDGCSCRFPEEEEGGCELRVKFSRSAD |
| | | APAYKQGQNQLYNELNLGRREEYDVLDKRRGRDPEMGGKPRRKNPQEGLYNELQKDKMAEAYSEI |
| | | GMKGERRRGKGHDGLYQGLSTATKDTYDALHMQALPPR |
| 139119- nt | 2300 | ATGGCCCTCCCTGTCACCGCCCTGCTGCTTCCGCTGGCTCTTCTGCTCCACGCCGCTCGGCCCCA |
| Full CAR | | AGTGCAACTTCAAGAATCAGGCGCAGGACTTCTCAAGCCATCCGAAACACTCTCCCTCACTTGCG |
| CLL-1 CAR | | CGGTGTACGGGGGAAGCTTCTCGGGATACTACTGGTCCTGGATTAGGCAGCCTCCCGGCAAAGGC |
| 6 | | CTGGAATGGGTCGGGGAGATCAACCACTCCGGTTCAACCAACTACAACCCGTCGCTGAAGTCCCG |
| | | CGTGACCATTTCCGTGGACACCTCTAAGAATCAGTTCAGCCTGAAGCTCTCGTCCGTGACCGCGG |
| | | CGGACACCGCCGTCTACTACTGCGCTCGGGGATCAGGACTGGTGGTGTACGCCATCCGCGTGGGC |
| | | TCGGGCTGGTTCGATTACTGGGGCCAGGGAACCCTGGTCACTGTGTCGTCCGGCGGAGGAGGTTC |
| | | GGGGGGCGGAGACAGCGGTGGAGGGGGTAGCGACATCCAGATGACCCAGTCCCCGTCCTCGCTGT |
| | | CCGCCTCCGTGGGAGATAGAGTGACCATCACCTGTCGGGCATCCCAGAGCATTTCCAGCTACCTG |
| | | AACTGGTATCAGCAGAAGCCCGGAAAGGCCCCTAAGCTGTTGATGTACGCCGCCAGCAGCTTGCA |
| | | GTCGGGCGTGCCGAGCCGGTTTTCCGGTTCCGGCTCCGGGACTGACTTCACCCTGACTATCTCAT |
| | | CCCTGCAACCCGAGGACTTCGCCACTTATTACTGCCAGCAGTCCTACTCAACCCCTCCCTGGACG |
| | | TTCGGACAGGGCACCAAGGTCGATATCAAGACCACTACCCCAGCACCGAGGCCACCCACCCCGGC |
| | | TCCTACCATCGCCTCCCAGCCTCTGTCCCTGCGTCCGGAGGCATGTAGACCCGCAGCTGGTGGGG |
| | | CCGTGCATACCCGGGGTCTTGACTTCGCCTGCGATATCTACATTTGGGCCCCTCTGGCTGGTACT |
| | | TGCGGGGTCCTGCTGCTTTCACTCGTGATCACTCTTTACTGTAAGCGCGGTCGGAAGAAGCTGCT |
| | | GTACATCTTTAAGCAACCCTTCATGAGGCCTGTGCAGACTACTCAAGAGGAGGACGGCTGTTCAT |
| | | GCCGGTTCCCAGAGGAGGAGGAAGGCGGCTGCGAACTGCGCGTGAAATTCAGCCGCAGCGCAGAT |
| | | GCTCCAGCCTACAAGCAGGGGCAGAACCAGCTCTACAACGAACTCAATCTTGGTCGGAGAGAGGA |
| | | GTACGACGTGCTGGACAAGCGGAGAGGACGGGACCCAGAAATGGGCGGGAAGCCGCGCAGAAAGA |
| | | ATCCCCAAGAGGGCCTGTACAACGAGCTCCAAAAGGATAAGATGGCAGAAGCCTATAGCGAGATT |
| | | GGTATGAAAGGGGAACGCAGAAGAGGCAAAGGCCACGACGGACTGTACCAGGGACTCAGCACCGC |
| | | CACCAAGGACACCTATGACGCTCTTCACATGCAGGCCCTGCCGCCTCGG |

139120

| | | |
|---|---|---|
| 139120- aa | 2301 | EVQLVESGGGLVKPGGSLRLSCAASGFTFSSYSMNWVRQAPGKGLEWVSSISSSSSYIYYADSVK |
| ScFv domain | | GRFTISRDNAKNSLYLQMNSLRAEDTAVYYCARDPSSSGSYYMEDSYYYGMDVWGQGTTVTVSSG |
| CLL-1 CAR | | GGGSGGGGSGGGGSNFMLTQPHSVSESPGKTVTISCTGSSGSIASNYVQWYQQRPGSAPTTVIYE |
| 7 | | DNQRPSGVPDRFSGSIDSSSNSASLTISGLKTEDEADYYCQSYDSSNQVVFGGGTKLTVL |
| 139120- nt | 2302 | GAAGTGCAATTGGTGGAATCTGGAGGAGGACTTGTGAAACCTGGTGGAAGCCTGAGACTTTCCTG |
| ScFv domain | | TGCGGCCTCGGGATTCACTTTCTCCTCCTACTCCATGAACTGGGTCAGACAGGCCCCTGGGAAGG |
| CLL-1 CAR | | GACTGGAATGGGTGTCATCCATCTCCTCCTCATCGTCGTACATCTACTACGCCGATAGCGTGAAG |
| 7 | | GGGCGGTTCACCATTTCCCGGGACAACGCTAAGAACAGCCTCTATCTGCAAATGAATTCCCTCCG |
| | | CGCCGAGGACACTGCCGTGTACTACTGCGCGAGGGACCCCTCATCAAGCGGCAGCTACTACATGG |
| | | AGGACTCGTATTACTACGGAATGGACGTCTGGGGCCAGGGAACCACTGTGACGGTGTCCTCCGGT |
| | | GGAGGGGGCTCCGGGGGCGGGGGATCTGGCGGAGGAGGCTCCAACTTCATGCTGACCCAGCCGCA |
| | | CTCCGTGTCCGAAAGCCCCGGAAAGACCGTGACAATTTCCTGCACCGGGTCCTCCGGCTCGATCG |
| | | CATCAAACTACGTGCAGTGGTACCAGCAGCGCCCGGGCAGCGCCCCCACCACTGTCATCTACGAG |
| | | GATAACCAGCGGCCGTCGGGTGTCCCAGACCGGTTTTCCGGTTCGATCGATAGCAGCAGCAACAG |
| | | CGCCTCCCTGACCATTTCCGGCCTCAAGACCGAGGATGAGGCTGACTACTACTGCCAGTCGTATG |
| | | ACTCCTCGAACCAAGTGGTGTTCGGTGGCGGCACCAAGCTGACTGTGCTG |
| 139120- aa | 2303 | EVQLVESGGGLVKPGGSLRLSCAASGFTFSSYSMNWVRQAPGKGLEWVSSISSSSSYIYYADSVK |
| VH of ScFv | | GRFTISRDNAKNSLYLQMNSLRAEDTAVYYCARDPSSSGSYYMEDSYYYGMDVWGQGTTVTVSS |
| CLL-1 CAR | | |
| 7 | | |
| 139120- aa | 2304 | NFMLTQPHSVSESPGKTVTISCTGSSGSIASNYVQWYQQRPGSAPTTVIYEDNQRPSGVPDRFSG |
| VL of ScFv | | SIDSSSNSASLTISGLKTEDEADYYCQSYDSSNQVVFGGGTKLTVL |
| CLL-1 CAR | | |
| 7 | | |
| 139120- aa | 2305 | MALPVTALLLPLALLLHAARPEVQLVESGGGLVKPGGSLRLSCAASGFTFSSYSMNWVRQAPGKG |
| Full CAR | | LEWVSSISSSSSYIYYADSVKGRFTISRDNAKNSLYLQMNSLRAEDTAVYYCARDPSSSGSYYME |
| CLL-1 CAR | | DSYYYGMDVWGQGTTVTVSSGGGGSGGGGSGGGGSNFMLTQPHSVSESPGKTVTISCTGSSGSIA |
| 7 | | SNYVQWYQQRPGSAPTTVIYEDNQRPSGVPDRFSGSIDSSSNSASLTISGLKTEDEADYYCQSYD |
| | | SSNQVVFGGGTKLTVLTTTPAPRPPTPAPTIASQPLSLRPEACRPAAGGAVHTRGLDFACDIYIW |
| | | APLAGTCGVLLLSLVITLYCKRGRKKLLYIFKQPFMRPVQTTQEEDGCSCRFPEEEEGGCELRVK |
| | | FSRSADAPAYKQGQNQLYNELNLGRREEYDVLDKRRGRDPEMGGKPRRKNPQEGLYNELQKDKMA |
| | | EAYSEIGMKGERRRGKGHDGLYQGLSTATKDTYDALHMQALPPR |
| 139120- nt | 2306 | ATGGCCCTCCCTGTCACCGCCCTGCTGCTTCCGCTGGCTCTTCTGCTCCACGCCGCTCGGCCCGA |
| Full CAR | | AGTGCAATTGGTGGAATCTGGAGGAGGACTTGTGAAACCTGGTGGAAGCCTGAGACTTTCCTGTG |
| CLL-1 CAR | | CGGCCTCGGGATTCACTTTCTCCTCCTACTCCATGAACTGGGTCAGACAGGCCCCTGGGAAGGGA |
| 7 | | CTGGAATGGGTGTCATCCATCTCCTCCTCATCGTCGTACATCTACTACGCCGATAGCGTGAAGGG |
| | | GCGGTTCACCATTTCCCGGGACAACGCTAAGAACAGCCTCTATCTGCAAATGAATTCCCTCCGCG |
| | | CCGAGGACACTGCCGTGTACTACTGCGCGAGGGACCCCTCATCAAGCGGCAGCTACTACATGGAG |
| | | GACTCGTATTACTACGGAATGGACGTCTGGGGCCAGGGAACCACTGTGACGGTGTCCTCCGGTGG |
| | | AGGGGGCTCCGGGGGCGGGGGATCTGGCGGAGGAGGCTCCAACTTCATGCTGACCCAGCCGCACT |
| | | CCGTGTCCGAAAGCCCCGGAAAGACCGTGACAATTTCCTGCACCGGGTCCTCCGGCTCGATCGCA |
| | | TCAAACTACGTGCAGTGGTACCAGCAGCGCCCGGGCAGCGCCCCCACCACTGTCATCTACGAGGA |
| | | TAACCAGCGGCCGTCGGGTGTCCCAGACCGGTTTTCCGGTTCGATCGATAGCAGCAGCAACAGCG |
| | | CCTCCCTGACCATTTCCGGCCTCAAGACCGAGGATGAGGCTGACTACTACTGCCAGTCGTATGAC |
| | | TCCTCGAACCAAGTGGTGTTCGGTGGCGGCACCAAGCTGACTGTGCTGACCACTACCCCAGCACC |
| | | GAGGCCACCCACCCCGGCTCCTACCATCGCCTCCCAGCCTCTGTCCCTGCGTCCGGAGGCATGTA |
| | | GACCCGCAGCTGGTGGGGCCGTGCATACCCGGGGTCTTGACTTCGCCTGCGATATCTACATTTGG |
| | | GCCCCTCTGGCTGGTACTTGCGGGGTCCTGCTGCTTTCACTCGTGATCACTCTTTACTGTAAGCG |
| | | CGGTCGGAAGAAGCTGCTGTACATCTTTAAGCAACCCTTCATGAGGCCTGTGCAGACTACTCAAG |
| | | AGGAGGACGGCTGTTCATGCCGGTTCCCAGAGGAGGAGGAAGGCGGCTGCGAACTGCGCGTGAAA |
| | | TTCAGCCGCAGCGCAGATGCTCCAGCCTACAAGCAGGGGCAGAACCAGCTCTACAACGAACTCAA |
| | | TCTTGGTCGGAGAGAGGAGTACGACGTGCTGGACAAGCGGAGAGGACGGGACCCAGAAATGGGCG |
| | | GGAAGCCGCGCAGAAAGAATCCCCAAGAGGGCCTGTACAACGAGCTCCAAAAGGATAAGATGGCA |
| | | GAAGCCTATAGCGAGATTGGTATGAAAGGGGAACGCAGAAGAGGCAAAGGCCACGACGGACTGTA |
| | | CCAGGGACTCAGCACCGCCACCAAGGACACCTATGACGCTCTTCACATGCAGGCCCTGCCGCCTC |
| | | GG |

139121

| | | |
|---|---|---|
| 139121- aa | | QVNLRESGGGLVQPGGSLRLSCAASGFTFSSYEMNWVRQAPGKGLEWVSYISSSGSTIYYADSVK |
| ScFv domain | 2307 | GRFTISRDNAKNSLYLQMNSLRAEDTAVYYCAREALGSSWEWGQGTTVTVSSGGGGSGGGGSGGG |
| CLL-1 CAR | | GSDIQMTQSPSSLSASVGDRVTITCQASQDISNYLNWYQQKPGKAPKLLIYDASNLETGVPSRFS |
| 8 | | GSGSGTDFTFTISSLQPEDIATYYCQQYDNLPLTFGGGTKLEIK |
| 139121- nt | 2308 | CAAGTGAACCTGAGAGAAAGCGGCGGAGGACTTGTGCAACCTGGAGGAAGCCTGAGACTGTCATG |
| ScFv domain | | TGCCGCGTCCGGCTTCACCTTCTCGTCCTACGAGATGAACTGGGTCCGCCAGGCACCGGGCAAAG |
| CLL-1 CAR | | GACTGGAATGGGTGTCCTACATTTCCTCGTCCGGGTCCACCATCTATTACGCCGACTCCGTGAAG |
| 8 | | GGACGGTTCACCATCTCCCGGGACAACGCCAAGAACTCCCTCTACCTCCAAATGAACTCACTGAG |
| | | GGCAGAGGACACTGCGGTCTACTACTGCGCCCGCGAAGCTTTGGGTAGCTCCTGGGAGTGGGGCC |
| | | AGGGAACCACTGTGACCGTGTCCTCGGGTGGAGGGGGCTCCGGTGGCGGGGGTTCAGGGGGTGGC |
| | | GGAAGCGATATCCAGATGACTCAGTCACCAAGCTCCCTGAGCGCCTCAGTGGGAGATCGGGTCAC |
| | | AATCACGTGCCAGGCGTCCCAGGACATTTCTAACTACCTCAATTGGTACCAGCAGAAGCCGGGGA |
| | | AGGCCCCCAAGCTTCTGATCTACGATGCCTCCAACCTGGAAACCGGCGTGCCCTCCCGCTTCTCG |
| | | GGATCGGGCAGCGGCACTGACTTCACCTTTACCATCTCGTCCCTGCAACCTGAGGACATCGCCAC |
| | | CTATTACTGCCAGCAGTACGATAACCTCCCGCTGACTTTCGGAGGCGGAACTAAGCTGGAGATTA |
| | | AG |
| 139121- aa | 2309 | QVNLRESGGGLVQPGGSLRLSCAASGFTFSSYEMNWVRQAPGKGLEWVSYISSSGSTIYYADSVK |
| VH of ScFv | | GRFTISRDNAKNSLYLQMNSLRAEDTAVYYCAREALGSSWEWGQGTTVTVSS |
| CLL-1 CAR | | |
| 8 | | |
| 139121- aa | 2310 | DIQMTQSPSSLSASVGDRVTITCQASQDISNYLNWYQQKPGKAPKLLIYDASNLETGVPSRFSGS |
| VL of ScFv | | GSGTDFTFTISSLQPEDIATYYCQQYDNLPLTFGGGTKLEIK |
| CLL-1 CAR | | |
| 8 | | |
| 139121- aa | 2311 | MALPVTALLLPLALLLHAARPQVNLRESGGGLVQPGGSLRLSCAASGFTFSSYEMNWVRQAPGKG |
| Full CAR | | LEWVSYISSSGSTIYYADSVKGRFTISRDNAKNSLYLQMNSLRAEDTAVYYCAREALGSSWEWGQ |
| CLL-1 CAR | | GTTVTVSSGGGGSGGGGSGGGGSDIQMTQSPSSLSASVGDRVTITCQASQDISNYLNWYQQKPGK |
| 8 | | APKLLIYDASNLETGVPSRFSGSGSGTDFTFTISSLQPEDIATYYCQQYDNLPLTFGGGTKLEIK |
| | | TTTPAPRPPTPAPTIASQPLSLRPEACRPAAGGAVHTRGLDFACDIYIWAPLAGTCGVLLLSLVI |
| | | TLYCKRGRKKLLYIFKQPFMRPVQTTQEEDGCSCRFPEEEEGGCELRVKFSRSADAPAYKQGQNQ |
| | | LYNELNLGRREEYDVLDKRRGRDPEMGGKPRRKNPQEGLYNELQKDKMAEAYSEIGMKGERRRGK |
| | | GHDGLYQGLSTATKDTYDALHMQALPPR |
| 139121- nt | 2312 | ATGGCCCTCCCTGTCACCGCCCTGCTGCTTCCGCTGGCTCTTCTGCTCCACGCCGCTCGGCCCCA |
| Full CAR | | AGTGAACCTGAGAGAAAGCGGCGGAGGACTTGTGCAACCTGGAGGAAGCCTGAGACTGTCATGTG |
| CLL-1 CAR | | CCGCGTCCGGCTTCACCTTCTCGTCCTACGAGATGAACTGGGTCCGCCAGGCACCGGGCAAAGGA |
| 8 | | CTGGAATGGGTGTCCTACATTTCCTCGTCCGGGTCCACCATCTATTACGCCGACTCCGTGAAGGG |
| | | ACGGTTCACCATCTCCCGGGACAACGCCAAGAACTCCCTCTACCTCCAAATGAACTCACTGAGGG |
| | | CAGAGGACACTGCGGTCTACTACTGCGCCCGCGAAGCTTTGGGTAGCTCCTGGGAGTGGGGCCAG |
| | | GGAACCACTGTGACCGTGTCCTCGGGTGGAGGGGGCTCCGGTGGCGGGGGTTCAGGGGGTGGCGG |
| | | AAGCGATATCCAGATGACTCAGTCACCAAGCTCCCTGAGCGCCTCAGTGGGAGATCGGGTCACAA |
| | | TCACGTGCCAGGCGTCCCAGGACATTTCTAACTACCTCAATTGGTACCAGCAGAAGCCGGGGAAG |
| | | GCCCCCAAGCTTCTGATCTACGATGCCTCCAACCTGGAAACCGGCGTGCCCTCCCGCTTCTCGGG |
| | | ATCGGGCAGCGGCACTGACTTCACCTTTACCATCTCGTCCCTGCAACCTGAGGACATCGCCACCT |
| | | ATTACTGCCAGCAGTACGATAACCTCCCGCTGACTTTCGGAGGCGGAACTAAGCTGGAGATTAAG |
| | | ACCACTACCCCAGCACCGAGGCCACCCACCCCGGCTCCTACCATCGCCTCCCAGCCTCTGTCCCT |
| | | GCGTCCGGAGGCATGTAGACCCGCAGCTGGTGGGGCCGTGCATACCCGGGGTCTTGACTTCGCCT |
| | | GCGATATCTACATTTGGGCCCCTCTGGCTGGTACTTGCGGGGTCCTGCTGCTTTCACTCGTGATC |
| | | ACTCTTTACTGTAAGCGCGGTCGGAAGAAGCTGCTGTACATCTTTAAGCAACCCTTCATGAGGCC |
| | | TGTGCAGACTACTCAAGAGGAGGACGGCTGTTCATGCCGGTTCCCAGAGGAGGAGGAAGGCGGCT |
| | | GCGAACTGCGCGTGAAATTCAGCCGCAGCGCAGATGCTCCAGCCTACAAGCAGGGGCAGAACCAG |
| | | CTCTACAACGAACTCAATCTTGGTCGGAGAGAGGAGTACGACGTGCTGGACAAGCGGAGAGGACG |
| | | GGACCCAGAAATGGGCGGGAAGCCGCGCAGAAAGAATCCCCAAGAGGGCCTGTACAACGAGCTCC |
| | | AAAAGGATAAGATGGCAGAAGCCTATAGCGAGATTGGTATGAAAGGGGAACGCAGAAGAGGCAAA |
| | | GGCCACGACGGACTGTACCAGGGACTCAGCACCGCCACCAAGGACACCTATGACGCTCTTCACAT |
| | | GCAGGCCCTGCCGCCTCGG |

146259

| | | |
|---|---|---|
| 146259- aa | 2313 | QVQLVQSGAEVKEPGASVKVSCKAPANTFSDHVMHWVRQAPGQRFEWMGYIHAANGGTHYSQKFQ |
| ScFv domain | | DRVTITRDTSANTVYMDLSSLRSEDTAVYYCARGGYNSDAFDIWGQGTMVTVSSGGGGSGGGGSG |
| CLL-1 CAR | | GGGSGGGGSDIVMTQSPSSVSASVGDRVTITCRASQDISSWLAWYQQKPGKAPKLLIYAASSLQS |
| 9 | | GVPSRFNGSGSGTDFTLTISSLQPEDFATYYCQQSYSTPLTFGGGTKVEIK |
| 146259- nt | 2314 | CAAGTGCAACTCGTCCAGTCCGGTGCAGAAGTCAAGGAACCCGGAGCCTCCGTGAAAGTGTCCTG |
| ScFv domain | | CAAAGCTCCTGCCAACACTTTCTCGGACCACGTGATGCACTGGGTGCGCCAGGCGCCGGGCCAGC |
| CLL-1 CAR | | GCTTCGAATGGATGGGATACATTCATGCCGCCAATGGCGGTACCCACTACTCCCAAAAGTTCCAG |
| 9 | | GATAGAGTCACCATCACCCGGGACACCAGCGCCAACACCGTGTATATGGATCTGTCCAGCCTGAG |
| | | GTCCGAGGATACCGCCGTGTACTACTGCGCCCGGGGCGGATACAACTCAGACGCGTTCGACATTT |
| | | GGGGACAGGGTACTATGGTCACCGTGTCATCCGGGGGCGGTGGCAGCGGGGGCGGAGGCTCTGGC |
| | | GGAGGCGGATCAGGGGGAGGAGGGTCCGACATCGTGATGACCCAGTCCCCGTCATCGGTGTCCGC |
| | | GTCCGTGGGAGACAGAGTGACCATCACGTGTCGCGCCAGCCAGGACATCTCCTCGTGGTTGGCAT |
| | | GGTACCAGCAGAAGCCTGGAAAGGCCCCGAAGCTGCTCATCTACGCCGCCTCCTCCCTTCAATCG |
| | | GGAGTGCCCTCGCGGTTCAACGGAAGCGGAAGCGGGACAGATTTTACCCTGACTATTAGCTCGCT |
| | | GCAGCCCGAGGACTTCGCTACTTACTACTGCCAACAGAGCTACTCCACCCCACTGACTTTCGGCG |
| | | GGGGTACCAAGGTCGAGATCAAG |
| 146259- aa | 2315 | QVQLVQSGAEVKEPGASVKVSCKAPANTFSDHVMHWVRQAPGQRFEWMGYIHAANGGTHYSQKFQ |
| VH of ScFv | | DRVTITRDTSANTVYMDLSSLRSEDTAVYYCARGGYNSDAFDIWGQGTMVTVSS |
| CLL-1 CAR | | |
| 9 | | |
| 146259- aa | 2316 | DIVMTQSPSSVSASVGDRVTITCRASQDISSWLAWYQQKPGKAPKLLIYAASSLQSGVPSRFNGS |
| VL of ScFv | | GSGTDFTLTISSLQPEDFATYYCQQSYSTPLTFGGGTKVEIK |
| CLL-1 CAR | | |
| 9 | | |
| 146259- aa | 2317 | MALPVTALLLPLALLLHAARPQVQLVQSGAEVKEPGASVKVSCKAPANTFSDHVMHWVRQAPGQR |
| Full CAR | | FEWMGYIHAANGGTHYSQKFQDRVTITRDTSANTVYMDLSSLRSEDTAVYYCARGGYNSDAFDIW |
| CLL-1 CAR | | GQGTMVTVSSGGGGSGGGGSGGGGSGGGGSDIVMTQSPSSVSASVGDRVTITCRASQDISSWLAW |
| 9 | | YQQKPGKAPKLLIYAASSLQSGVPSRFNGSGSGTDFTLTISSLQPEDFATYYCQQSYSTPLTFGG |
| | | GTKVEIKTTTPAPRPPTPAPTIASQPLSLRPEACRPAAGGAVHTRGLDFACDIYIWAPLAGTCGV |
| | | LLLSLVITLYCKRGRKKLLYIFKQPFMRPVQTTQEEDGCSCRFPEEEEGGCELRVKFSRSADAPA |
| | | YKQGQNQLYNELNLGRREEYDVLDKRRGRDPEMGGKPRRKNPQEGLYNELQKDKMAEAYSEIGMK |
| | | GERRRGKGHDGLYQGLSTATKDTYDALHMQALPPR |
| 146259- nt | 2318 | ATGGCCCTCCCTGTCACCGCCCTGCTGCTTCCGCTGGCTCTTCTGCTCCACGCCGCTCGGCCCCA |
| Full CAR | | AGTGCAACTCGTCCAGTCCGGTGCAGAAGTCAAGGAACCCGGAGCCTCCGTGAAAGTGTCCTGCA |
| CLL-1 CAR | | AAGCTCCTGCCAACACTTTCTCGGACCACGTGATGCACTGGGTGCGCCAGGCGCCGGGCCAGCGC |
| 9 | | TTCGAATGGATGGGATACATTCATGCCGCCAATGGCGGTACCCACTACTCCCAAAAGTTCCAGGA |
| | | TAGAGTCACCATCACCCGGGACACCAGCGCCAACACCGTGTATATGGATCTGTCCAGCCTGAGGT |
| | | CCGAGGATACCGCCGTGTACTACTGCGCCCGGGGCGGATACAACTCAGACGCGTTCGACATTTGG |
| | | GGACAGGGTACTATGGTCACCGTGTCATCCGGGGGCGGTGGCAGCGGGGGCGGAGGCTCTGGCGG |
| | | AGGCGGATCAGGGGGAGGAGGGTCCGACATCGTGATGACCCAGTCCCCGTCATCGGTGTCCGCGT |
| | | CCGTGGGAGACAGAGTGACCATCACGTGTCGCGCCAGCCAGGACATCTCCTCGTGGTTGGCATGG |
| | | TACCAGCAGAAGCCTGGAAAGGCCCCGAAGCTGCTCATCTACGCCGCCTCCTCCCTTCAATCGGG |
| | | AGTGCCCTCGCGGTTCAACGGAAGCGGAAGCGGGACAGATTTTACCCTGACTATTAGCTCGCTGC |
| | | AGCCCGAGGACTTCGCTACTTACTACTGCCAACAGAGCTACTCCACCCCACTGACTTTCGGCGGG |
| | | GGTACCAAGGTCGAGATCAAGACCACTACCCCAGCACCGAGGCCACCCACCCCGGCTCCTACCAT |
| | | CGCCTCCCAGCCTCTGTCCCTGCGTCCGGAGGCATGTAGACCCGCAGCTGGTGGGGCCGTGCATA |
| | | CCCGGGGTCTTGACTTCGCCTGCGATATCTACATTTGGGCCCCTCTGGCTGGTACTTGCGGGGTC |
| | | CTGCTGCTTTCACTCGTGATCACTCTTTACTGTAAGCGCGGTCGGAAGAAGCTGCTGTACATCTT |
| | | TAAGCAACCCTTCATGAGGCCTGTGCAGACTACTCAAGAGGAGGACGGCTGTTCATGCCGGTTCC |
| | | CAGAGGAGGAGGAAGGCGGCTGCGAACTGCGCGTGAAATTCAGCCGCAGCGCAGATGCTCCAGCC |
| | | TACAAGCAGGGGCAGAACCAGCTCTACAACGAACTCAATCTTGGTCGGAGAGAGGAGTACGACGT |
| | | GCTGGACAAGCGGAGAGGACGGGACCCAGAAATGGGCGGGAAGCCGCGCAGAAAGAATCCCCAAG |
| | | AGGGCCTGTACAACGAGCTCCAAAAGGATAAGATGGCAGAAGCCTATAGCGAGATTGGTATGAAA |
| | | GGGGAACGCAGAAGAGGCAAAGGCCACGACGGACTGTACCAGGGACTCAGCACCGCCACCAAGGA |
| | | CACCTATGACGCTCTTCACATGCAGGCCCTGCCGCCTCGG |

146261

| | | |
|---|---|---|
| 146261- aa | 2319 | QVQLVQSGGGLVQPGGSLRLSCAASGFTFSSYSMNWVRQAPGKGLEWVSYISSSSSTIYYADSVK |
| ScFv domain | | GRFTISRDNAKNSLYLQMNSLRAEDTAVYYCARDLSVRAIDAFDIWGQGTMVTVSSGGGGSGGGG |
| CLL-1 CAR | | SGGGGSGGGGSDIVLTQSPSSLSASVGDRVTITCQASQDISNYLNWYQQKPGKAPKLLIYDASNL |
| 10 | | ETGVPSRFSGSGSGTDFTFTISSLQPEDFATYYCQQAYSTPFTFGPGTKVEIK |
| 146261- nt | 2320 | CAAGTGCAACTTGTTCAATCCGGTGGAGGTCTTGTGCAGCCCGGAGGATCACTCAGACTGTCGTG |
| ScFv domain | | CGCCGCCTCTGGGTTCACTTTCTCCTCATACTCGATGAACTGGGTGCGCCAGGCGCCGGGAAAGG |
| CLL-1 CAR | | GCCTGGAATGGGTGTCATACATCTCCTCCTCATCCTCCACCATCTACTACGCCGATTCCGTGAAG |
| 10 | | GGCCGCTTCACTATTTCCCGGGACAACGCGAAAAACTCGCTCTATCTGCAAATGAACTCCCTGCG |
| | | CGCCGAGGACACCGCCGTGTACTACTGCGCCCGGGACCTGAGCGTGCGGGCTATTGATGCGTTCG |
| | | ACATCTGGGGACAGGGCACCATGGTCACAGTGTCCAGCGGAGGCGGCGGCAGCGGTGGAGGAGGA |
| | | TCAGGGGGAGGAGGTTCGGGGGGCGGTGGCTCCGATATCGTGCTGACCCAGAGCCCGTCGAGCCT |
| | | CTCCGCCTCCGTCGGCGACAGAGTGACCATCACGTGTCAGGCATCCCAGGACATTAGCAACTACC |
| | | TGAATTGGTACCAGCAGAAGCCTGGAAAGGCACCCAAGTTGCTGATCTACGACGCCTCCAACCTG |
| | | GAAACCGGAGTGCCATCCAGGTTCTCGGGCAGCGGCTCGGGAACCGACTTCACTTTTACTATCTC |
| | | CTCCCTGCAACCCGAGGATTTCGCGACCTACTACTGCCAGCAGGCCTACAGCACCCCTTTCACCT |
| | | TCGGGCCGGGAACTAAGGTCGAAATCAAG |
| 146261- aa | 2321 | QVQLVQSGGGLVQPGGSLRLSCAASGFTFSSYSMNWVRQAPGKGLEWVSYISSSSSTIYYADSVK |
| VH of ScFv | | GRFTISRDNAKNSLYLQMNSLRAEDTAVYYCARDLSVRAIDAFDIWGQGTMVTVSS |
| CLL-1 CAR | | |
| 10 | | |
| 146261- aa | 2322 | DIVLTQSPSSLSASVGDRVTITCQASQDISNYLNWYQQKPGKAPKLLIYDASNLETGVPSRFSGS |
| VL of ScFv | | GSGTDFTFTISSLQPEDFATYYCQQAYSTPFTFGPGTKVEIK |
| CLL-1 CAR | | |
| 10 | | |
| 146261- aa | 2323 | MALPVTALLLPLALLLHAARPQVQLVQSGGGLVQPGGSLRLSCAASGFTFSSYSMNWVRQAPGKG |
| Full | | LEWVSYISSSSSTIYYADSVKGRFTISRDNAKNSLYLQMNSLRAEDTAVYYCARDLSVRAIDAFD |
| CLL-1 CAR | CAR | IWGQGTMVTVSSGGGGSGGGGSGGGGSGGGGSDIVLTQSPSSLSASVGDRVTITCQASQDISNYL |
| 10 | | NWYQQKPGKAPKLLIYDASNLETGVPSRFSGSGSGTDFTFTISSLQPEDFATYYCQQAYSTPFTF |
| | | GPGTKVEIKTTTPAPRPPTPAPTIASQPLSLRPEACRPAAGGAVHTRGLDFACDIYIWAPLAGTC |
| | | GVLLLSLVITLYCKRGRKKLLYIFKQPFMRPVQTTQEEDGCSCRFPEEEEGGCELRVKFSRSADA |
| | | PAYKQGQNQLYNELNLGRREEYDVLDKRRGRDPEMGGKPRRKNPQEGLYNELQKDKMAEAYSEIG |
| | | [sequence omitted] |
| 146261- nt | 2324 | ATGGCCCTCCCTGTCACCGCCCTGCTGCTTCCGCTGGCTCTTCTGCTCCACGCCGCTCGGCCCCA |
| Full CAR | | AGTGCAACTTGTTCAATCCGGTGGAGGTCTTGTGCAGCCCGGAGGATCACTCAGACTGTCGTGCG |
| CLL-1 CAR | | CCGCCTCTGGGTTCACTTTCTCCTCATACTCGATGAACTGGGTGCGCCAGGCGCCGGGAAAGGGC |
| 10 | | CTGGAATGGGTGTCATACATCTCCTCCTCATCCTCCACCATCTACTACGCCGATTCCGTGAAGGG |
| | | CCGCTTCACTATTTCCCGGGACAACGCGAAAAACTCGCTCTATCTGCAAATGAACTCCCTGCGCG |
| | | CCGAGGACACCGCCGTGTACTACTGCGCCCGGGACCTGAGCGTGCGGGCTATTGATGCGTTCGAC |
| | | ATCTGGGGACAGGGCACCATGGTCACAGTGTCCAGCGGAGGCGGCGGCAGCGGTGGAGGAGGATC |
| | | AGGGGGAGGAGGTTCGGGGGGCGGTGGCTCCGATATCGTGCTGACCCAGAGCCCGTCGAGCCTCT |
| | | CCGCCTCCGTCGGCGACAGAGTGACCATCACGTGTCAGGCATCCCAGGACATTAGCAACTACCTG |
| | | AATTGGTACCAGCAGAAGCCTGGAAAGGCACCCAAGTTGCTGATCTACGACGCCTCCAACCTGGA |
| | | AACCGGAGTGCCATCCAGGTTCTCGGGCAGCGGCTCGGGAACCGACTTCACTTTTACTATCTCCT |
| | | CCCTGCAACCCGAGGATTTCGCGACCTACTACTGCCAGCAGGCCTACAGCACCCCTTTCACCTTC |
| | | GGGCCGGGAACTAAGGTCGAAATCAAGACCACTACCCCAGCACCGAGGCCACCCACCCCGGCTCC |
| | | TACCATCGCCTCCCAGCCTCTGTCCCTGCGTCCGGAGGCATGTAGACCCGCAGCTGGTGGGGCCG |
| | | TGCATACCCGGGGTCTTGACTTCGCCTGCGATATCTACATTTGGGCCCCTCTGGCTGGTACTTGC |
| | | GGGGTCCTGCTGCTTTCACTCGTGATCACTCTTTACTGTAAGCGCGGTCGGAAGAAGCTGCTGTA |
| | | CATCTTTAAGCAACCCTTCATGAGGCCTGTGCAGACTACTCAAGAGGAGGACGGCTGTTCATGCC |
| | | GGTTCCCAGAGGAGGAGGAAGGCGGCTGCGAACTGCGCGTGAAATTCAGCCGCAGCGCAGATGCT |
| | | CCAGCCTACAAGCAGGGGCAGAACCAGCTCTACAACGAACTCAATCTTGGTCGGAGAGAGGAGTA |
| | | CGACGTGCTGGACAAGCGGAGAGGACGGGACCCAGAAATGGGCGGGAAGCCGCGCAGAAAGAATC |
| | | CCCAAGAGGGCCTGTACAACGAGCTCCAAAAGGATAAGATGGCAGAAGCCTATAGCGAGATTGGT |
| | | ATGAAAGGGGAACGCAGAAGAGGCAAAGGCCACGACGGACTGTACCAGGGACTCAGCACCGCCAC |
| | | CAAGGACACCTATGACGCTCTTCACATGCAGGCCCTGCCGCCTCGG |

146262

| | | |
|---|---|---|
| 146262- aa | 2325 | EVQLVQSGGGVVRSGRSLRLSCAASGFTFNSYGLHWVRQAPGKGLEWVALIEYDGSNKYYGDSVK |
| ScFv domain | | GRFTISRDKSKSTLYLQMDNLRAEDTAVYYCAREGNEDLAFDIWGQGTLVTVSSGGGGSGGGGSG |
| CLL-1 CAR | | GGGSGGGGSEIVLTQSPSSLSASVGDRVTITCQASQFIKKNLNWYQHKPGKAPKLLIYDASSLQT |
| 11 | | GVPSRFSGNRSGTTFSFTISSLQPEDVATYYCQQHDNLPLTFGGGTKVEIK |
| 146262- nt | 2326 | GAAGTGCAATTGGTGCAATCAGGAGGAGGAGTGGTCAGATCTGGAAGAAGCCTGAGACTGTCATG |
| ScFv domain | | CGCGGCTTCGGGCTTTACCTTCAACTCCTACGGCCTCCACTGGGTGCGCCAGGCCCCCGGAAAAG |
| CLL-1 CAR | | GCCTCGAATGGGTCGCACTGATTGAGTACGACGGGTCCAACAAGTACTACGGAGATAGCGTGAAG |
| 11 | | GGCCGCTTCACCATCTCACGGGACAAGTCCAAGTCCACCCTGTATCTGCAAATGGACAACCTGAG |
| | | GGCCGAGGATACTGCCGTGTACTACTGCGCCCGCGAAGGAAACGAAGATCTGGCCTTCGATATTT |
| | | GGGGCCAGGGTACTCTTGTGACCGTGTCGAGCGGAGGCGGAGGCTCCGGTGGAGGAGGATCGGGG |
| | | GGTGGTGGTTCCGGCGGCGGGGGGAGCGAAATCGTGCTGACCCAGTCGCCTTCCTCCCTCTCCGC |
| | | TTCCGTGGGGGACCGGGTCACTATTACGTGTCAGGCGTCCCAATTCATCAAGAAGAATCTGAACT |
| | | GGTACCAGCACAAGCCGGGAAAGGCCCCCAAACTGCTCATCTACGACGCCAGCTCGCTGCAGACT |
| | | GGCGTGCCTTCCCGGTTTTCCGGGAACCGGTCGGGAACCACCTTCTCATTCACCATCAGCAGCCT |
| | | CCAGCCGGAGGACGTGGCGACCTACTACTGCCAGCAGCATGACAACCTTCCACTGACTTTCGGCG |
| | | GGGGCACCAAGGTCGAGATTAAG |
| 146262- aa | 2327 | EVQLVQSGGGVVRSGRSLRLSCAASGFTFNSYGLHWVRQAPGKGLEWVALIEYDGSNKYYGDSVK |
| VH of ScFv | | GRFTISRDKSKSTLYLQMDNLRAEDTAVYYCAREGNEDLAFDIWGQGTLVTVSS |
| CLL-1 CAR | | |
| 11 | | |
| 146262- aa | 2328 | EIVLTQSPSSLSASVGDRVTITCQASQFIKKNLNWYQHKPGKAPKLLIYDASSLQTGVPSRFSGN |
| VL of ScFv | | RSGTTFSFTISSLQPEDVATYYCQQHDNLPLTFGGGTKVEIK |
| CLL-1 CAR | | |
| 11 | | |
| 146262- aa | 2329 | MALPVTALLLPLALLLHAARPEVQLVQSGGGVVRSGRSLRLSCAASGFTFNSYGLHWVRQAPGKG |
| Full CAR | | LEWVALIEYDGSNKYYGDSVKGRFTISRDKSKSTLYLQMDNLRAEDTAVYYCAREGNEDLAFDIW |
| CLL-1 CAR | | GQGTLVTVSSGGGGSGGGGSGGGGSGGGGSEIVLTQSPSSLSASVGDRVTITCQASQFIKKNLNW |
| 11 | | YQHKPGKAPKLLIYDASSLQTGVPSRFSGNRSGTTFSFTISSLQPEDVATYYCQQHDNLPLTFGG |
| | | GTKVEIKTTTPAPRPPTPAPTIASQPLSLRPEACRPAAGGAVHTRGLDFACDIYIWAPLAGTCGV |
| | | LLLSLVITLYCKRGRKKLLYIFKQPFMRPVQTTQEEDGCSCRFPEEEEGGCELRVKFSRSADAPA |
| | | YKQGQNQLYNELNLGRREEYDVLDKRRGRDPEMGGKPRRKNPQEGLYNELQKDKMAEAYSEIGMK |
| | | GERRRGKGHDGLYQGLSTATKDTYDALHMQALPPR |
| 146262- nt | 2330 | ATGGCCCTCCCTGTCACCGCCCTGCTGCTTCCGCTGGCTCTTCTGCTCCACGCCGCTCGGCCCGA |
| Full CAR | | AGTGCAATTGGTGCAATCAGGAGGAGGAGTGGTCAGATCTGGAAGAAGCCTGAGACTGTCATGCG |
| CLL-1 CAR | | CGGCTTCGGGCTTTACCTTCAACTCCTACGGCCTCCACTGGGTGCGCCAGGCCCCCGGAAAAGGC |
| 11 | | CTCGAATGGGTCGCACTGATTGAGTACGACGGGTCCAACAAGTACTACGGAGATAGCGTGAAGGG |
| | | CCGCTTCACCATCTCACGGGACAAGTCCAAGTCCACCCTGTATCTGCAAATGGACAACCTGAGGG |
| | | CCGAGGATACTGCCGTGTACTACTGCGCCCGCGAAGGAAACGAAGATCTGGCCTTCGATATTTGG |
| | | GGCCAGGGTACTCTTGTGACCGTGTCGAGCGGAGGCGGAGGCTCCGGTGGAGGAGGATCGGGGGG |
| | | TGGTGGTTCCGGCGGCGGGGGGAGCGAAATCGTGCTGACCCAGTCGCCTTCCTCCCTCTCCGCTT |
| | | CCGTGGGGGACCGGGTCACTATTACGTGTCAGGCGTCCCAATTCATCAAGAAGAATCTGAACTGG |
| | | TACCAGCACAAGCCGGGAAAGGCCCCCAAACTGCTCATCTACGACGCCAGCTCGCTGCAGACTGG |
| | | CGTGCCTTCCCGGTTTTCCGGGAACCGGTCGGGAACCACCTTCTCATTCACCATCAGCAGCCTCC |
| | | AGCCGGAGGACGTGGCGACCTACTACTGCCAGCAGCATGACAACCTTCCACTGACTTTCGGCGGG |
| | | GGCACCAAGGTCGAGATTAAGACCACTACCCCAGCACCGAGGCCACCCACCCCGGCTCCTACCAT |
| | | CGCCTCCCAGCCTCTGTCCCTGCGTCCGGAGGCATGTAGACCCGCAGCTGGTGGGGCCGTGCATA |
| | | CCCGGGGTCTTGACTTCGCCTGCGATATCTACATTTGGGCCCCTCTGGCTGGTACTTGCGGGGTC |
| | | CTGCTGCTTTCACTCGTGATCACTCTTTACTGTAAGCGCGGTCGGAAGAAGCTGCTGTACATCTT |
| | | TAAGCAACCCTTCATGAGGCCTGTGCAGACTACTCAAGAGGAGGACGGCTGTTCATGCCGGTTCC |
| | | CAGAGGAGGAGGAAGGCGGCTGCGAACTGCGCGTGAAATTCAGCCGCAGCGCAGATGCTCCAGCC |
| | | TACAAGCAGGGGCAGAACCAGCTCTACAACGAACTCAATCTTGGTCGGAGAGAGGAGTACGACGT |
| | | GCTGGACAAGCGGAGAGGACGGGACCCAGAAATGGGCGGGAAGCCGCGCAGAAAGAATCCCCAAG |
| | | AGGGCCTGTACAACGAGCTCCAAAAGGATAAGATGGCAGAAGCCTATAGCGAGATTGGTATGAAA |
| | | GGGGAACGCAGAAGAGGCAAAGGCCACGACGGACTGTACCAGGGACTCAGCACCGCCACCAAGGA |
| | | CACCTATGACGCTCTTCACATGCAGGCCCTGCCGCCTCGG |

146263

| | | |
|---|---|---|
| 146263- aa | 2331 | QVQLVESGGGLVQPGGSLRLSCAASGFNVSSNYMTWVRQAPGKGLEWVSVIYSGGATYYGDSVKG |
| ScFv domain | | RFTVSRDNSKNTVYLQMNRLTAEDTAVYYCARDRLYCGNNCYLYYYYGMDVWGQGTLVTVSSGGG |
| LL-1 CAR | | GSGGGGSGGGGSGGGGSDIQVTQSPSSLSASVGDRVTITCRASQSISSYLNWYQQKPGKAPKLLI |
| 12 | | YAASSLQSGVPSRFSGSGSGTDFTLTISSLQPEDFATYYCQQSYSTPPLTFGQGTKVEIK |
| 146263- nt | 2332 | CAAGTGCAACTCGTGGAATCAGGCGGAGGACTCGTGCAACCCGGAGGTTCCCTTAGACTGTCATG |
| ScFv domain | | TGCCGCTTCCGGGTTCAATGTGTCCAGCAACTACATGACCTGGGTCAGACAGGCGCCGGGAAAGG |
| LL-1 CAR | | GACTTGAATGGGTGTCCGTGATCTACTCCGGTGGAGCAACATACTACGGAGACTCCGTGAAAGGC |
| 12 | | CGCTTTACCGTGTCCCGCGATAACTCGAAGAACACCGTGTACTTGCAGATGAACAGGCTGACTGC |
| | | CGAGGACACCGCCGTGTATTATTGCGCCCGGGACAGGCTGTACTGTGGAAACAACTGCTACCTGT |
| | | ACTACTACTACGGGATGGACGTGTGGGGACAGGGCACTCTCGTCACTGTGTCATCCGGGGGGGGC |
| | | GGTAGCGGTGGCGGAGGGTCCGGCGGAGGAGGCTCAGGGGGAGGCGGAAGCGATATCCAGGTCAC |
| | | CCAGTCTCCCTCCTCGCTGTCCGCCTCCGTGGGCGACCGCGTCACCATTACTTGCCGGGCGTCGC |
| | | AGTCGATCAGCTCCTACCTGAACTGGTACCAGCAGAAGCCTGGAAAGGCCCCGAAGCTGCTGATC |
| | | TACGCGGCCTCGTCCCTGCAAAGCGGCGTCCCGTCGCGGTTCAGCGGTTCCGGTTCGGGAACCGA |
| | | CTTCACCCTGACTATTTCCTCCCTGCAACCCGAGGATTTCGCCACTTACTACTGCCAGCAGTCCT |
| | | ACTCCACCCCACCTCTGACCTTCGGCCAAGGAACCAAGGTCGAAATCAAG |
| 146263- aa | 2333 | QVQLVESGGGLVQPGGSLRLSCAASGFNVSSNYMTWVRQAPGKGLEWVSVIYSGGATYYGDSVKG |
| VH of ScFv | | RFTVSRDNSKNTVYLQMNRLTAEDTAVYYCARDRLYCGNNCYLYYYYGMDVWGQGTLVTVSS |
| LL-1 CAR | | |
| 12 | | |
| 146263- aa | 2334 | DIQVTQSPSSLSASVGDRVTITCRASQSISSYLNWYQQKPGKAPKLLIYAASSLQSGVPSRFSGS |
| VL of ScFv | | GSGTDFTLTISSLQPEDFATYYCQQSYSTPPLTFGQGTKVEIK |
| LL-1 CAR | | |
| 12 | | |
| 146263- aa | 2335 | MALPVTALLLPLALLLHAARPQVQLVESGGGLVQPGGSLRLSCAASGFNVSSNYMTWVRQAPGKG |
| Full CAR | | LEWVSVIYSGGATYYGDSVKGRFTVSRDNSKNTVYLQMNRLTAEDTAVYYCARDRLYCGNNCYLY |
| LL-1 CAR | | YYYGMDVWGQGTLVTVSSGGGGSGGGGSGGGGSGGGGSDIQVTQSPSSLSASVGDRVTITCRASQ |
| 12 | | SISSYLNWYQQKPGKAPKLLIYAASSLQSGVPSRFSGSGSGTDFTLTISSLQPEDFATYYCQQSY |
| | | STPPLTFGQGTKVEIKTTTPAPRPPTPAPTIASQPLSLRPEACRPAAGGAVHTRGLDFACDIYIW |
| | | APLAGTCGVLLLSLVITLYCKRGRKKLLYIFKQPFMRPVQTTQEEDGCSCRFPEEEEGGCELRVK |
| | | FSRSADAPAYKQGQNQLYNELNLGRREEYDVLDKRRGRDPEMGGKPRRKNPQEGLYNELQKDKMA |
| | | EAYSEIGMKGERRRGKGHDGLYQGLSTATKDTYDALHMQALPPR |
| 146263- nt | 2336 | ATGGCCCTCCCTGTCACCGCCCTGCTGCTTCCGCTGGCTCTTCTGCTCCACGCCGCTCGGCCCCA |
| Full CAR | | AGTGCAACTCGTGGAATCAGGCGGAGGACTCGTGCAACCCGGAGGTTCCCTTAGACTGTCATGTG |
| LL-1 CAR | | CCGCTTCCGGGTTCAATGTGTCCAGCAACTACATGACCTGGGTCAGACAGGCGCCGGGAAAGGGA |
| 12 | | CTTGAATGGGTGTCCGTGATCTACTCCGGTGGAGCAACATACTACGGAGACTCCGTGAAAGGCCG |
| | | CTTTACCGTGTCCCGCGATAACTCGAAGAACACCGTGTACTTGCAGATGAACAGGCTGACTGCCG |
| | | AGGACACCGCCGTGTATTATTGCGCCCGGGACAGGCTGTACTGTGGAAACAACTGCTACCTGTAC |
| | | TACTACTACGGGATGGACGTGTGGGGACAGGGCACTCTCGTCACTGTGTCATCCGGGGGGGGCGG |
| | | TAGCGGTGGCGGAGGGTCCGGCGGAGGAGGCTCAGGGGGAGGCGGAAGCGATATCCAGGTCACCC |
| | | AGTCTCCCTCCTCGCTGTCCGCCTCCGTGGGCGACCGCGTCACCATTACTTGCCGGGCGTCGCAG |
| | | TCGATCAGCTCCTACCTGAACTGGTACCAGCAGAAGCCTGGAAAGGCCCCGAAGCTGCTGATCTA |
| | | CGCGGCCTCGTCCCTGCAAAGCGGCGTCCCGTCGCGGTTCAGCGGTTCCGGTTCGGGAACCGACT |
| | | TCACCCTGACTATTTCCTCCCTGCAACCCGAGGATTTCGCCACTTACTACTGCCAGCAGTCCTAC |
| | | TCCACCCCACCTCTGACCTTCGGCCAAGGAACCAAGGTCGAAATCAAGACCACTACCCCAGCACC |
| | | GAGGCCACCCACCCCGGCTCCTACCATCGCCTCCCAGCCTCTGTCCCTGCGTCCGGAGGCATGTA |
| | | GACCCGCAGCTGGTGGGGCCGTGCATACCCGGGGTCTTGACTTCGCCTGCGATATCTACATTTGG |
| | | GCCCCTCTGGCTGGTACTTGCGGGGTCCTGCTGCTTTCACTCGTGATCACTCTTTACTGTAAGCG |
| | | CGGTCGGAAGAAGCTGCTGTACATCTTTAAGCAACCCTTCATGAGGCCTGTGCAGACTACTCAAG |
| | | AGGAGGACGGCTGTTCATGCCGGTTCCCAGAGGAGGAGGAAGGCGGCTGCGAACTGCGCGTGAAA |
| | | TTCAGCCGCAGCGCAGATGCTCCAGCCTACAAGCAGGGGCAGAACCAGCTCTACAACGAACTCAA |
| | | TCTTGGTCGGAGAGAGGAGTACGACGTGCTGGACAAGCGGAGAGGACGGGACCCAGAAATGGGCG |
| | | GGAAGCCGCGCAGAAAGAATCCCCAAGAGGGCCTGTACAACGAGCTCCAAAAGGATAAGATGGCA |
| | | GAAGCCTATAGCGAGATTGGTATGAAAGGGGAACGCAGAAGAGGCAAAGGCCACGACGGACTGTA |
| | | CCAGGGACTCAGCACCGCCACCAAGGACACCTATGACGCTCTTCACATGCAGGCCCTGCCGCCTC |
| | | GG |

146264

| | | |
|---|---|---|
| 146264- aa | 2337 | QVQLVQSGAEVKKSGASVKVSCKASGYPFTGYYIQWVRQAPGQGLEWMGWIDPNSGNTGYAQKFQ |
| ScFv domain | | GRVTMTRNTSISTAYMELSSLRSEDTAVYYCASDSYGYYYGMDVWGQGTLVTVSSGGGGSGGGGS |
| LL-1 CAR | | GGGGSGGGGSDIQMTQSPSSLSASVGDRVTFTCRASQGISSALAWYQQKPGKPPKLLIYDASSLE |
| 13 | | SGVPSRFSGSGSGTDFTLTISSLQPEDFATYYCQQFNNYPLTFGGGTKVEIK |
| 146264- nt | 2338 | CAAGTGCAACTCGTCCAGTCCGGTGCAGAAGTGAAAAAGAGCGGAGCCTCAGTGAAAGTGTCCTG |
| ScFv domain | | CAAGGCCTCCGGTTACCCCTTCACTGGATACTACATTCAGTGGGTCCGCCAAGCCCCGGGACAGG |
| LL-1 CAR | | GTCTGGAGTGGATGGGGTGGATTGACCCTAACTCGGGAAATACGGGATACGCGCAGAAGTTCCAG |
| 13 | | GGCCGCGTGACCATGACCAGGAACACCTCGATCAGCACCGCCTACATGGAACTGTCCTCCCTGCG |
| | | GTCGGAGGATACTGCCGTGTACTACTGCGCCTCCGATTCCTATGGGTACTACTACGGAATGGACG |
| | | TCTGGGGACAGGGCACCCTCGTGACCGTGTCCTCGGGAGGCGGAGGGAGCGGCGGGGGTGGATCG |
| | | GGAGGAGGCGGCTCCGGCGGCGGCGGTAGCGACATCCAGATGACCCAGTCACCATCAAGCCTTAG |
| | | CGCCTCCGTGGGCGACAGAGTGACATTCACTTGTCGGGCGTCCCAGGGAATCTCCTCCGCTCTGG |
| | | CTTGGTATCAGCAGAAGCCTGGGAAGCCTCCGAAGCTGTTGATCTACGACGCGAGCAGCCTGGAA |
| | | TCAGGGGTGCCCTCCCGGTTTTCCGGGTCCGGTTCTGGCACCGATTTCACCCTGACCATTTCGTC |
| | | CCTCCAACCCGAGGACTTCGCCACTTACTACTGCCAGCAGTTCAACAACTACCCGCTGACCTTCG |
| | | GAGGAGGCACTAAGGTCGAGATCAAG |
| 146264- aa | 2339 | QVQLVQSGAEVKKSGASVKVSCKASGYPFTGYYIQWVRQAPGQGLEWMGWIDPNSGNTGYAQKFQ |
| VH of ScFv | | GRVTMTRNTSISTAYMELSSLRSEDTAVYYCASDSYGYYYGMDVWGQGTLVTVSS |
| LL-1 CAR | | |
| 13 | | |
| 146264- aa | 2340 | DIQMTQSPSSLSASVGDRVTFTCRASQGISSALAWYQQKPGKPPKLLIYDASSLESGVPSRFSGS |
| VL of ScFv | | GSGTDFTLTISSLQPEDFATYYCQQFNNYPLTFGGGTKVEIK |
| LL-1 CAR | | |
| 13 | | |
| 146264- aa | 2341 | MALPVTALLLPLALLLHAARPQVQLVQSGAEVKKSGASVKVSCKASGYPFTGYYIQWVRQAPGQG |
| Full CAR | | LEWMGWIDPNSGNTGYAQKFQGRVTMTRNTSISTAYMELSSLRSEDTAVYYCASDSYGYYYGMDV |
| LL-1 CAR | | WGQGTLVTVSSGGGGSGGGGSGGGGSGGGGSDIQMTQSPSSLSASVGDRVTFTCRASQGISSALA |
| 13 | | WYQQKPGKPPKLLIYDASSLESGVPSRFSGSGSGTDFTLTISSLQPEDFATYYCQQFNNYPLTFG |
| | | GGTKVEIKTTTPAPRPPTPAPTIASQPLSLRPEACRPAAGGAVHTRGLDFACDIYIWAPLAGTCG |
| | | VLLLSLVITLYCKRGRKKLLYIFKQPFMRPVQTTQEEDGCSCRFPEEEEGGCELRVKFSRSADAP |
| | | AYKQGQNQLYNELNLGRREEYDVLDKRRGRDPEMGGKPRRKNPQEGLYNELQKDKMAEAYSEIGM |
| | | KGERRRGKGHDGLYQGLSTATKDTYDALHMQALPPR |
| 146264- nt | 2342 | ATGGCCCTCCCTGTCACCGCCCTGCTGCTTCCGCTGGCTCTTCTGCTCCACGCCGCTCGGCCCCA |
| Full CAR | | AGTGCAACTCGTCCAGTCCGGTGCAGAAGTGAAAAAGAGCGGAGCCTCAGTGAAAGTGTCCTGCA |
| LL-1 CAR | | AGGCCTCCGGTTACCCCTTCACTGGATACTACATTCAGTGGGTCCGCCAAGCCCCGGGACAGGGT |
| 13 | | CTGGAGTGGATGGGGTGGATTGACCCTAACTCGGGAAATACGGGATACGCGCAGAAGTTCCAGGG |
| | | CCGCGTGACCATGACCAGGAACACCTCGATCAGCACCGCCTACATGGAACTGTCCTCCCTGCGGT |
| | | CGGAGGATACTGCCGTGTACTACTGCGCCTCCGATTCCTATGGGTACTACTACGGAATGGACGTC |
| | | TGGGGACAGGGCACCCTCGTGACCGTGTCCTCGGGAGGCGGAGGGAGCGGCGGGGGTGGATCGGG |
| | | AGGAGGCGGCTCCGGCGGCGGCGGTAGCGACATCCAGATGACCCAGTCACCATCAAGCCTTAGCG |
| | | CCTCCGTGGGCGACAGAGTGACATTCACTTGTCGGGCGTCCCAGGGAATCTCCTCCGCTCTGGCT |
| | | TGGTATCAGCAGAAGCCTGGGAAGCCTCCGAAGCTGTTGATCTACGACGCGAGCAGCCTGGAATC |
| | | AGGGGTGCCCTCCCGGTTTTCCGGGTCCGGTTCTGGCACCGATTTCACCCTGACCATTTCGTCCC |
| | | TCCAACCCGAGGACTTCGCCACTTACTACTGCCAGCAGTTCAACAACTACCCGCTGACCTTCGGA |
| | | GGAGGCACTAAGGTCGAGATCAAGACCACTACCCCAGCACCGAGGCCACCCACCCCGGCTCCTAC |
| | | CATCGCCTCCCAGCCTCTGTCCCTGCGTCCGGAGGCATGTAGACCCGCAGCTGGTGGGGCCGTGC |
| | | ATACCCGGGGTCTTGACTTCGCCTGCGATATCTACATTTGGGCCCCTCTGGCTGGTACTTGCGGG |
| | | GTCCTGCTGCTTTCACTCGTGATCACTCTTTACTGTAAGCGCGGTCGGAAGAAGCTGCTGTACAT |
| | | CTTTAAGCAACCCTTCATGAGGCCTGTGCAGACTACTCAAGAGGAGGACGGCTGTTCATGCCGGT |
| | | TCCCAGAGGAGGAGGAAGGCGGCTGCGAACTGCGCGTGAAATTCAGCCGCAGCGCAGATGCTCCA |
| | | GCCTACAAGCAGGGGCAGAACCAGCTCTACAACGAACTCAATCTTGGTCGGAGAGAGGAGTACGA |
| | | CGTGCTGGACAAGCGGAGAGGACGGGACCCAGAAATGGGCGGGAAGCCGCGCAGAAAGAATCCCC |
| | | AAGAGGGCCTGTACAACGAGCTCCAAAAGGATAAGATGGCAGAAGCCTATAGCGAGATTGGTATG |
| | | AAAGGGGAACGCAGAAGAGGCAAAGGCCACGACGGACTGTACCAGGGACTCAGCACCGCCACCAA |
| | | GGACACCTATGACGCTCTTCACATGCAGGCCCTGCCGCCTCGG |

181268

| | | |
|---|---|---|
| 181268- aa | 2343 | EVQLVESGGGLVQPGGSLRLSCAASGFTFSSYEMNWVRQAPGKGLEWVSYISSSGSTIYYADSVK |
| VH of ScFv | | GRFTISRDNAKNSLYLQMNSLRAEDTAVYYCARDPYSSSWHDAFDIWGQGTMVTVSS |
| 181268- aa | 2344 | EIVLTQSPGTLSLSPGERATLSCRASQSVSSSYLAWYQQKPGQAPRLLIYGASSRATGIPDRFSG |
| VL of ScFv | | SGSGTDFTLTISRLEPEDFAVYYCQQYGSSPLTFGGGTKVDIK |
| 181268- aa | 2345 | MALPVTALLLPLALLLHAARPEVQLVESGGGLVQPGGSLRLSCAASGFTFSSYEMNWVRQAPGKG |
| Full CAR | | LEWVSYISSSGSTIYYADSVKGRFTISRDNAKNSLYLQMNSLRAEDTAVYYCARDPYSSSWHDAF |
| | | DIWGQGTMVTVSSGGGGSGGGGSGGGGSEIVLTQSPGTLSLSPGERATLSCRASQSVSSSYLAWY |
| | | QQKPGQAPRLLIYGASSRATGIPDRFSGSGSGTDFTLTISRLEPEDFAVYYCQQYGSSPLTFGGG |
| | | TKVDIKTTTPAPRPPTPAPTIASQPLSLRPEACRPAAGGAVHTRGLDFACDIYIWAPLAGTCGVL |
| | | LLSLVITLYCKRGRKKLLYIFKQPFMRPVQTTQEEDGCSCRFPEEEEGGCELRVKFSRSADAPAY |
| | | KQGQNQLYNELNLGRREEYDVLDKRRGRDPEMGGKPRRKNPQEGLYNELQKDKMAEAYSEIGMKG |
| | | ERRRGKGHDGLYQGLSTATKDTYDALHMQALPPR |
| 181268- nt | 2346 | ATGGCCCTCCCTGTCACCGCCCTGCTGCTTCCGCTGGCTCTTCTGCTCCACGCCGCTCGGCCCGA |
| Full CAR | | AGTGCAACTCGTGGAAAGCGGTGGAGGTCTTGTGCAACCTGGAGGTTCCTTGCGCCTGTCATGTG |
| | | CAGCTTCCGGCTTCACTTTCTCCTCGTACGAGATGAATTGGGTGCGGCAGGCGCCTGGAAAGGGG |
| | | CTGGAATGGGTGTCCTACATCTCAAGCTCCGGCTCGACCATCTACTACGCGGACAGCGTGAAGGG |
| | | GCGGTTCACGATTTCGAGGGACAACGCCAAGAACTCGCTCTATCTGCAAATGAACTCCCTGAGAG |
| | | CCGAGGACACCGCTGTGTATTACTGCGCCCGGGACCCCTACTCCTCCTCATGGCACGACGCCTTT |
| | | GATATCTGGGGCCAGGGAACCATGGTCACCGTCAGCAGCGGGGGCGGAGGTTCCGGGGGAGGGGG |
| | | CTCCGGCGGAGGAGGCTCCGAGATTGTGTTGACTCAGAGCCCGGGTACCCTGTCGCTGAGCCCCG |
| | | GAGAGCGGGCCACCCTTTCATGCCGCGCCAGCCAGTCCGTGTCCTCATCCTACCTCGCGTGGTAC |
| | | CAGCAGAAACCTGGCCAGGCCCCGCGGCTGCTGATCTACGGCGCCTCCTCGCGCGCAACCGGAAT |
| | | CCCCGACCGGTTCTCCGGGTCTGGCAGCGGAACCGACTTCACTCTCACCATTTCGAGGCTGGAGC |
| | | CGGAAGATTTCGCCGTGTACTACTGCCAGCAGTACGGCTCCTCGCCACTGACTTTCGGCGGAGGA |
| | | ACCAAGGTCGATATCAAGACCACTACCCCAGCACCGAGGCCACCCACCCCGGCTCCTACCATCGC |
| | | CTCCCAGCCTCTGTCCCTGCGTCCGGAGGCATGTAGACCCGCAGCTGGTGGGGCCGTGCATACCC |
| | | GGGGTCTTGACTTCGCCTGCGATATCTACATTTGGGCCCCTCTGGCTGGTACTTGCGGGGTCCTG |
| | | CTGCTTTCACTCGTGATCACTCTTTACTGTAAGCGCGGTCGGAAGAAGCTGCTGTACATCTTTAA |
| | | GCAACCCTTCATGAGGCCTGTGCAGACTACTCAAGAGGAGGACGGCTGTTCATGCCGGTTCCCAG |
| | | AGGAGGAGGAAGGCGGCTGCGAACTGCGCGTGAAATTCAGCCGCAGCGCAGATGCTCCAGCCTAC |
| | | AAGCAGGGGCAGAACCAGCTCTACAACGAACTCAATCTTGGTCGGAGAGAGGAGTACGACGTGCT |
| | | GGACAAGCGGAGAGGACGGGACCCAGAAATGGGCGGGAAGCCGCGCAGAAAGAATCCCCAAGAGG |
| | | GCCTGTACAACGAGCTCCAAAAGGATAAGATGGCAGAAGCCTATAGCGAGATTGGTATGAAAGGG |
| | | GAACGCAGAAGAGGCAAAGGCCACGACGGACTGTACCAGGGACTCAGCACCGCCACCAAGGACAC |
| | | CTATGACGCTCTTCACATGCAGGCCCTGCCGCCTCGG |

The sequences of humanized CDR sequences of the scFv domains are shown in Table 30 for the heavy chain variable domains and in Table 31 for the light chain variable domains. “ID” stands for the respective SEQ ID NO for each CDR

TABLE 30
Heavy Chain Variable Domain CDRs (Kabat)

| Candidate | HCDR1 | ID | HCDR2 | ID | HCDR3 | ID |
|---|---|---|---|---|---|---|
| CLL-1 CAR 1 | GGTFSSYAIS | 2347 | GIIPIFGTANYAQK | 2359 | DLEMATIMGGY | 2370 |
| | | | FQ | | | |
| CLL-1 CAR 2 | GFTFDDYAM | 2348 | LISGDGGSTYYAD | 2360 | VFDSYYMDV | 2371 |
| | H | | SVKG | | | |
| CLL-1 CAR 3 | GGSISSSSYY | 2349 | SIYYSGSTYYNPSL | 2361 | PGTYYDFLSGYYPFY | 2372 |
| | WG | | KS | | | |
| CLL-1 CAR 4 | GFTFSSYWMS | 2350 | NINEDGSAKFYVD | 2362 | DLRSGRY | 2373 |
| | | | SVKG | | | |
| CLL-1 CAR 5 | GGPVRSGSHY | 2351 | YIYYSGSTNYNPS | 2363 | GTATFDWNFPFDS | 2374 |
| | WN | | LEN | | | |
| CLL-1 CAR 6 | GGSFSGYYWS | 2352 | EINHSGSTNYNPS | 2364 | GSGLVVYAIRVGSGWF | 2375 |
| | | | LKS | | DY | |
| CLL-1 CAR 7 | GFTFSSYSMN | 2353 | SISSSSSYIYYADS | 1175 | DPSSSGSYYMEDSYYY | 2376 |
| | | | VKG | | GMDV | |
| CLL-1 CAR 8 | GFTFSSYEMN | 2354 | YISSSGSTIYYADS | 1168 | EALGSSWE | 2377 |
| | | | VKG | | | |
| CLL-1 CAR 9 | ANTFSDHVM | 2355 | YIHAANGGTHYS | 2365 | GGYNSDAFDI | 2378 |
| | H | | QKFQD | | | |
| CLL-1 CAR 10 | GFTFSSYSMN | 2353 | YISSSSSTIYYADS | 2366 | DLSVRAIDAFDI | 2379 |
| | | | VKG | | | |
| CLL-1 CAR 11 | GFTFNSYGLH | 2356 | LIEYDGSNKYYGD | 2367 | EGNEDLAFDI | 2380 |
| | | | SVKG | | | |
| CLL-1 CAR 12 | GFNVSSNYMT | 2357 | VIYSGGATYYGDS | 2368 | DRLYCGNNCYLYYYYG | 2381 |
| | | | VKG | | MDV | |
| CLL-1 CAR 13 | GYPFTGYYIQ | 2358 | WIDPNSGNTGYA | 12369 | DSYGYYYGMDV | 2382 |
| | | | QKFQG | | | |
| 181268 | GFTFSSYEMN | 2354 | YISSSGSTIYYADS | 1168 | DPYSSSWHDAFDI | 2383 |
| | | | VKG | | | |

TABLE 31
Light Chain Variable Domain CDRs

| Candidate | LCDR1 | ID | LCDR2 | ID | LCDR3 | ID |
|---|---|---|---|---|---|---|
| CLL-1 CAR 1 | TGTSSDVGGYNYVS | 2260 | DVSNRPS | 2261 | SSYTSSSTLDVV | 2397 |
| CLL-1 CAR 2 | RSSQSLVYTDGNTYLN | 2384 | KVSNRDS | 2391 | MQGTHWSFT | 2398 |
| CLL-1 CAR 3 | RASQGISSYLA | 2385 | AASTLQS | 2392 | QQLNSYPYT | 2399 |
| CLL-1 CAR 4 | RASQSISGSFLA | 2386 | GASSRAT | 1303 | QQYGSSPPT | 2400 |
| CLL-1 CAR 5 | RASQSISSYLN | 1238 | AASSLQS | 1278 | QQSYSTPWT | 2401 |
| CLL-1 CAR 6 | RASQSISSYLN | 1238 | AASSLQS | 1278 | QQSYSTPPWT | 2402 |
| CLL-1 CAR 7 | TGSSGSIASNYVQ | 2387 | EDNQRPS | 2393 | QSYDSSNQVV | 2403 |
| CLL-1 CAR 8 | QASQDISNYLN | 2388 | DASNLET | 2394 | QQYDNLPLT | 2404 |
| CLL-1 CAR 9 | RASQDISSWLA | 164 | AASSLQS | 1278 | QQSYSTPLT | 2405 |
| CLL-1 CAR 10 | QASQDISNYLN | 2388 | DASNLET | 2394 | QQAYSTPFT | 2406 |
| CLL-1 CAR 11 | QASQFIKKNLN | 2389 | DASSLQT | 2395 | QQHDNLPLT | 2407 |
| CLL-1 CAR 12 | RASQSISSYLN | 1238 | AASSLQS | 1278 | QQSYSTPPLT | 2408 |
| CLL-1 CAR 13 | RASQGISSALA | 2390 | DASSLES | 2396 | QQFNNYPLT | 2409 |
| 181268 | RASQSVSSSYLA | 1267 | GASSRAT | 1303 | QQYGSSPLT | 2410 |

[0422] In some embodiments, the antigen binding domain comprises a HC CDR1, a HC CDR2, and a HC CDR3 of any heavy chain binding domain amino acid sequences listed in Table 30. In embodiments, the antigen binding domain further comprises a LC CDR1, a LC CDR2, and a LC CDR3. In embodiments, the antigen binding domain comprises a LC CDR1, a LC CDR2, and a LC CDR3 amino acid sequences listed in Table 31.

[0423] In some embodiments, the antigen binding domain comprises one, two or all of LC CDR1, LC CDR2, and LC CDR3 of any light chain binding domain amino acid sequences listed in Table 31, and one, two or all of HC CDR1, HC CDR2, and HC CDR3 of any heavy chain binding domain amino acid sequences listed in Table 30.

[0424] In some embodiments, the CDRs are defined according to the Kabat numbering scheme, the Chothia numbering scheme, or a combination thereof.

### CD123 CAR and CD123 Binding Sequences

[0425] In some embodiments, the TOX^{hi} CAR cell described herein is a CD123 CAR expressing cell (e.g., a cell expressing a CAR that binds to CD123). In embodiments, the CAR-expressing cell which can specifically bind to CD123, e.g., can include a CAR molecule (e.g., any of the CAR1 to CAR8), or an antigen binding domain according to Tables 1-2 of WO 2014/130635, incorporated herein by reference. The amino acid and nucleotide sequences encoding the CD123 CAR molecules and antigen binding domains (e.g., including one, two, three VH CDRs; and one, two, three VL CDRs according to Kabat or Chothia), as specified in WO 2014/130635, are provided in Tables 22-28. Amino and nucleotide sequences identical and substantially identical to the aforesaid sequences provided in Tables 22-28 are specifically incorporated into the instant specification.

[0426] The CDRs for CD123 binding domains provided in Tables 22-28 are according to a combination of the Kabat and Chothia numbering scheme.

TABLE 22
Heavy Chain Variable Domain CDRs

| | | SEQ | | SEQ | | SEQ |
|---|---|---|---|---|---|---|
| | | ID | | ID | | ID |
| Candidate | HCDR1 | NO | HCDR2 | NO | HCDR3 | NO |
| CAR123- | GYTFTGYYMH | 2411 | WINTPNSGGTNYAQKFQG | 2414 | DMNILATVPFDI | 2416 |
| 2 | | | | | | |
| CAR123- | GYIFTGYYIH | 2412 | WINTPNSGGTNYAQKFQG | 2414 | DMNILATVPFDI | 2416 |
| 3 | | | | | | |
| CAR123- | GYTFTGYYMH | 2411 | WINTPNSGGTNYAQKFQG | 2414 | DMNILATVPFDI | 2416 |
| 4 | | | | | | |
| CAR123- | GYTFTDYYMH | 2413 | WINTPNSGDTNYAQKFQG | 2415 | DMNILATVPFDI | 2416 |
| 1 | | | | | | |

TABLE 23
Light Chain Variable Domain CDRs

| | | SEQ | | | | SEQ |
|---|---|---|---|---|---|---|
| | | ID | | SEQ | | ID |
| Candidate | LCDR1 | NO | LCDR2 | ID NO | LCDR3 | NO |
| CAR123-2 | RASQSISSYLN | 1238 | AAFSLQS | 2418 | QQGDSVPLT | 2419 |
| CAR123-3 | RASQSISSYLN | 1238 | AASSLQS | 1278 | QQGDSVPLT | 2419 |
| CAR123-4 | RASQSISSYLN | 1238 | AASSLQS | 1278 | QQGDSVPLT | 2419 |
| CAR123-1 | RASQSISTYLN | 2417 | AASSLQS | 1278 | QQGDSVPLT | 2419 |

TABLE 24
Heavy Chain Variable Domain CDR

| | | SEQ | | SEQ | | SEQ |
|---|---|---|---|---|---|---|
| | | ID | | ID | | ID |
| | HCDR1 | NO | HCDR2 | NO | HCDR3 | NO |
| hzCAR123 | GYTFTSY | 2420 | RIDPYDSET | 2421 | GNWDD | 2422 |
| | WMN | | HYNQKFKD | | Y | |

TABLE 25
Light Chain Variable Domain CDR

| | | SEQ | | SEQ | | SEQ |
|---|---|---|---|---|---|---|
| | | ID | | ID | | ID |
| | LCDR1 | NO | LCDR2 | NO | LCDR3 | NO |
| hzCAR123 | RASKSI | 2423 | SGSTLQS | 2424 | QQHNK | 2425 |
| | SKDLA | | | | YPYT | |

TABLE 26
Exemplary CD123 CAR sequences

| Name | SEQ ID | Sequence |
|---|---|---|
| CAR123-2 NT | 2426 | atggccctccctgtcaccgccctgctgcttccgctggctcttctgctccacgccgctcggccccaag |
| | | tgcaactcgtccaaagcggagcggaagtcaagaaacccggagcgagcgtgaaagtgtcctgcaa |
| | | agcctccggctacacctttacgggctactacatgcactgggtgcgccaggcaccaggacagggtc |
| | | ttgaatggatgggatggatcaaccctaattcgggcggaactaactacgcacagaagttccagggga |
| | | gagtgactctgactcgggatacctccatctcaactgtctacatggaactctcccgcttgcggtcagat |
| | | gatacggcagtgtactactgcgcccgcgacatgaatatcctggctaccgtgccgttcgacatctggg |
| | | gacaggggactatggttactgtctcatcgggcggtggaggttcaggaggaggcggctcgggagg |
| | | cggaggttcggacattcagatgacccagtccccatcctctctgtcggccagcgtcggagatagggt |
| | | gaccattacctgtcgggcctcgcaaagcatctcctcgtacctcaactggtatcagcaaaagccggg |
| | | aaaggcgcctaagctgctgatctacgccgcttcgagcttgcaaagcggggtgccatccagattctc |
| | | gggatcaggctcaggaaccgacttcaccctgaccgtgaacagcctccagccggaggactttgcca |
| | | cttactactgccagcagggagactccgtgccgcttactttcggggggggtacccgcctggagatca |
| | | agaccactaccccagcaccgaggccacccaccccggctcctaccatcgcctcccagcctctgtcc |
| | | ctgcgtccggaggcatgtagacccgcagctggtggggccgtgcatacccggggtcttgacttcgc |
| | | ctgcgatatctacatttgggcccctctggctggtacttgcggggtcctgctgctttcactcgtgatcact |
| | | ctttactgtaagcgcggtcggaagaagcCgctgtacatctttaagcaacccttcatgaggcctgtgca |
| | | gactactcaagaggaggacggctgttcatgccggttcccagaggaggaggaaggcggctgcgaa |
| | | ctgcgcgtgaaattcagccgcagcgcagatgctccagcctacaagcaggggcagaaccagctct |
| | | acaacgaactcaatcttggtcggagagaggagtacgacgtgctggacaagcggagaggacggg |
| | | acccagaaatgggcgggaagccgcgcagaaagaatccccaagagggcctgtacaacgagctcc |
| | | aaaaggataagatggcagaagcctatagcgagattggtatgaaaggggaacgcagaagaggcaa |
| | | aggccacgacggactgtaccagggactcagcaccgccaccaaggacacctatgacgctcttcac |
| | | atgcaggccctgccgcctcgg |
| CAR123-2 | 2427 | MALPVTALLLPLALLLHAARPQVQLVQSGAEVKKPGASVKVS |
| AA | | CKASGYTFTGYYMHWVRQAPGQGLEWMGWINPNSGGTNYA |
| | | QKFQGRVTLTRDTSISTVYMELSRLRSDDTAVYYCARDMNILA |
| | | TVPFDIWGQGTMVTVSSGGGGSGGGGSGGGGSDIQMTQSPSS |
| | | LSASVGDRVTITCRASQSISSYLNWYQQKPGKAPKLLIYAASSL |
| | | QSGVPSRFSGSGSGTDFTLTVNSLQPEDFATYYCQQGDSVPLTF |
| | | GGGTRLEIKTTTPAPRPPTPAPTIASQPLSLRPEACRPAAGGAV |
| | | HTRGLDFACDIYIWAPLAGTCGVLLLSLVITLYCKRGRKKLLYI |
| | | FKQPFMRPVQTTQEEDGCSCRFPEEEEGGCELRVKFSRSADAP |
| | | AYKQGQNQLYNELNLGRREEYDVLDKRRGRDPEMGGKPRRK |
| | | NPQEGLYNELQKDKMAEAYSEIGMKGERRRGKGHDGLYQGL |
| | | STATKDTYDALHMQALPPR |
| CAR123-2 | 2428 | MALPVTALLLPLALLLHAARPQVQLVQSGAEVKKPGASVKVS |
| scFv | | CKASGYTFTGYYMHWVRQAPGQGLEWMGWINPNSGGTNYA |
| | | QKFQGRVTLTRDTSISTVYMELSRLRSDDTAVYYCARDMNILA |
| | | TVPFDIWGQGTMVTVSSGGGGSGGGGSGGGGSDIQMTQSPSS |
| | | LSASVGDRVTITCRASQSISSYLNWYQQKPGKAPKLLIYAASSL |
| | | QSGVPSRFSGSGSGTDFTLTVNSLQPEDFATYYCQQGDSVPLTF |
| | | GGGTRLEIK |
| CAR123-2 | 2429 | QVQLVQSGAEVKKPGASVKVSCKASGYTFTGYYMHWVRQAP |
| VH | | GQGLEWMGWINPNSGGTNYAQKFQGRVTLTRDTSISTVYMEL |
| | | SRLRSDDTAVYYCARDMNILATVPFDIWGQGTMVTVSS |
| CAR123-2 | 2430 | DIQMTQSPSSLSASVGDRVTITCRASQSISSYLNWYQQKPGKAP |
| VL | | KLLIYAASSLQSGVPSRFSGSGSGTDFTLTVNSLQPEDFATYYC |
| | | QQGDSVPLTFGGGTRLEIK |
| CAR123-3 | 2431 | atggccctccctgtcaccgccctgctgcttccgctggctcttctgctccacgccgctcggccccaag |
| NT | | tccaactcgttcaatccggcgcagaagtcaagaagccaggagcatcagtgaaagtgtcctgcaaa |
| | | gcctcaggctacatcttcacgggatactacatccactgggtgcgccaggctccgggccagggcctt |
| | | gagtggatgggctggatcaaccctaactctgggggaaccaactacgctcagaagttccaggggag |
| | | ggtcactatgactcgcgatacctccatctccactgcgtacatggaactctcgggactgagatccgac |
| | | gatcctgccgtgtactactgcgcccgggacatgaacatcttggcgaccgtgccgtttgacatttggg |
| | | gacagggcaccctcgtcactgtgtcgagcggtggaggaggctcggggggtggcggatcaggag |
| | | ggggaggaagcgacatccagctgactcagagcccatcgtcgttgtccgcgtcggtgggggatag |
| | | agtgaccattacttgccgcgccagccagagcatctcatcatatctgaattggtaccagcagaagccc |
| | | ggaaaggccccaaaactgctgatctacgctgcaagcagcctccaatcgggagtgccgtcacggtt |
| | | ctccgggtccggttcgggaactgactttaccctgaccgtgaattcgctgcaaccggaggatttcgcc |
| | | acgtactactgtcagcaaggagactccgtgccgctgaccttcggtggaggcaccaaggtcgaaat |
| | | caagaccactaccccagcaccgaggccacccaccccggctcctaccatcgcctcccagcctctgt |
| | | ccctgcgtccggaggcatgtagacccgcagctggtggggccgtgcatacccggggtcttgacttc |
| | | gcctgcgatatctacatttgggcccctctggctggtacttgcggggtcctgctgctttcactcgtgatc |
| | | actctttactgtaagcgcggtcggaagaagctgctgtacatctttaagcaacccttcatgaggcctgt |
| | | gcagactactcaagaggaggacggctgttcatgccggttcccagaggaggaggaaggcggctgc |
| | | gaactgcgcgtgaaattcagccgcagcgcagatgctccagcctacaagcaggggcagaaccagc |
| | | tctacaacgaactcaatcttggtcggagagaggagtacgacgtgctggacaagcggagaggacg |
| | | ggacccagaaatgggcgggaagccgcgcagaaagaatccccaagagggcctgtacaacgagct |
| | | ccaaaaggataagatggcagaagcctatagcgagattggtatgaaaggggaacgcagaagaggc |
| | | aaaggccacgacggactgtaccagggactcagcaccgccaccaaggacacctatgacgctcttc |
| | | acatgcaggccctgccgcctcgg |
| CAR123-3 | 2432 | MALPVTALLLPLALLLHAARPQVQLVQSGAEVKKPGASVKVS |
| AA | | CKASGYIFTGYYIHWVRQAPGQGLEWMGWINPNSGGTNYAQ |
| | | KFQGRVTMTRDTSISTAYMELSGLRSDDPAVYYCARDMNILA |
| | | TVPFDIWGQGTLVTVSSGGGGSGGGGSGGGGSDIQLTQSPSSL |
| | | SASVGDRVTITCRASQSISSYLNWYQQKPGKAPKLLIYAASSLQ |
| | | SGVPSRFSGSGSGTDFTLTVNSLQPEDFATYYCQQGDSVPLTFG |
| | | GGTKVEIKTTTPAPRPPTPAPTIASQPLSLRPEACRPAAGGAVH |
| | | TRGLDFACDIYIWAPLAGTCGVLLLSLVITLYCKRGRKKLLYIF |
| | | KQPFMRPVQTTQEEDGCSCRFPEEEEGGCELRVKFSRSADAPA |
| | | YKQGQNQLYNELNLGRREEYDVLDKRRGRDPEMGGKPRRKN |
| | | PQEGLYNELQKDKMAEAYSEIGMKGERRRGKGHDGLYQGLS |
| | | TATKDTYDALHMQALPPR |
| CAR123-3 | 2433 | MALPVTALLLPLALLLHAARPQVQLVQSGAEVKKPGASVKVS |
| scFv | | CKASGYIFTGYYIHWVRQAPGQGLEWMGWINPNSGGTNYAQ |
| | | KFQGRVTMTRDTSISTAYMELSGLRSDDPAVYYCARDMNILA |
| | | TVPFDIWGQGTLVTVSSGGGGSGGGGSGGGGSDIQLTQSPSSL |
| | | SASVGDRVTITCRASQSISSYLNWYQQKPGKAPKLLIYAASSLQ |
| | | SGVPSRFSGSGSGTDFTLTVNSLQPEDFATYYCQQGDSVPLTFG |
| | | GGTKVEIK |
| CAR123-3 | 2434 | QVQLVQSGAEVKKPGASVKVSCKASGYIFTGYYIHWVRQAPG |
| VH | | QGLEWMGWINPNSGGTNYAQKFQGRVTMTRDTSISTAYMEL |
| | | SGLRSDDPAVYYCARDMNILATVPFDIWGQGTLVTVSS |
| CAR123-3 | 2435 | DIQLTQSPSSLSASVGDRVTITCRASQSISSYLNWYQQKPGKAP |
| VL | | KLLIYAASSLQSGVPSRFSGSGSGTDFTLTVNSLQPEDFATYYC |
| | | QQGDSVPLTFGGGTKVEIK |
| CAR123-4 | 2436 | atggccctccctgtcaccgccctgctgcttccgctggctcttctgctccacgccgctcggccccaag |
| NT | | tccaactccaacagtcaggcgcagaagtgaaaaagagcggtgcatcggtgaaagtgtcatgcaaa |
| | | gcctcgggctacaccttcactgactactatatgcactggctgcggcaggcaccgggacagggactt |
| | | gagtggatgggatggatcaacccgaattcaggggacactaactacgcgcagaagttccagggga |
| | | gagtgaccctgacgagggacacctcaatttcgaccgtctacatggaattgtcgcgcctgagatcgg |
| | | acgatactgctgtgtactactgtgcccgcgacatgaacatcctcgcgactgtgccttttgatatctggg |
| | | gacaggggactatggtcaccgtttcctccgcttccggtggcggaggctcgggaggccgggcctcc |
| | | ggtggaggaggcagcgacatccagatgactcagagcccttcctcgctgagcgcctcagtgggag |
| | | atcgcgtgaccatcacttgccgggccagccagtccatttcgtcctacctcaattggtaccagcagaa |
| | | gccgggaaaggcgcccaagctcttgatctacgctgcgagctccctgcaaagcggggtgccgagc |
| | | cgattctcgggttccggctcgggaaccgacttcactctgaccatctcatccctgcaaccagaggact |
| | | ttgccacctactactgccaacaaggagattctgtcccactgacgttcggcggaggaaccaaggtcg |
| | | aaatcaagaccactaccccagcaccgaggccacccaccccggctcctaccatcgcctcccagcct |
| | | ctgtccctgcgtccggaggcatgtagacccgcagctggtggggccgtgcatacccggggtcttga |
| | | cttcgcctgcgatatctacatttgggcccctctggctggtacttgcggggtcctgctgctttcactcgtg |
| | | atcactctttactgtaagcgcggtcggaagaagctgctgtacatctttaagcaacccttcatgaggcct |
| | | gtgcagactactcaagaggaggacggctgttcatgccggttcccagaggaggaggaaggcggct |
| | | gcgaactgcgcgtgaaattcagccgcagcgcagatgctccagcctacaagcaggggcagaacca |
| | | gctctacaacgaactcaatcttggtcggagagaggagtacgacgtgctggacaagcggagagga |
| | | cgggacccagaaatgggcgggaagccgcgcagaaagaatccccaagagggcctgtacaacga |
| | | gctccaaaaggataagatggcagaagcctatagcgagattggtatgaaaggggaacgcagaaga |
| | | ggcaaaggccacgacggactgtaccagggactcagcaccgccaccaaggacacctatgacgct |
| | | cttcacatgcaggccctgccgcctcgg |
| CAR123-4 | 2437 | MALPVTALLLPLALLLHAARPQVQLQQSGAEVKKSGASVKVS |
| AA | | CKASGYTFTDYYMHWLRQAPGQGLEWMGWINPNSGDTNYA |
| | | QKFQGRVTLTRDTSISTVYMELSRLRSDDTAVYYCARDMNILA |
| | | TVPFDIWGQGTMVTVSSASGGGGSGGRASGGGGSDIQMTQSP |
| | | SSLSASVGDRVTITCRASQSISSYLNWYQQKPGKAPKLLIYAAS |
| | | SLQSGVPSRFSGSGSGTDFTLTISSLQPEDFATYYCQQGDSVPL |
| | | TFGGGTKVEIKTTTPAPRPPTPAPTIASQPLSLRPEACRPAAGGA |
| | | VHTRGLDFACDIYIWAPLAGTCGVLLLSLVITLYCK |
| CAR123-4 | 2438 | MALPVTALLLPLALLLHAARPQVQLQQSGAEVKKSGASVKVS |
| scFv | | CKASGYTFTDYYMHWLRQAPGQGLEWMGWINPNSGDTNYA |
| | | QKFQGRVTLTRDTSISTVYMELSRLRSDDTAVYYCARDMNILA |
| | | TVPFDIWGQGTMVTVSSASGGGGSGGRASGGGGSDIQMTQSP |
| | | SSLSASVGDRVTITCRASQSISSYLNWYQQKPGKAPKLLIYAAS |
| | | SLQSGVPSRFSGSGSGTDFTLTISSLQPEDFATYYCQQGDSVPL |
| | | TFGGGTKVEIK |
| CAR123-4 | 2439 | QVQLQQSGAEVKKSGASVKVSCKASGYTFTDYYMHWLRQAP |
| VH | | GQGLEWMGWINPNSGDTNYAQKFQGRVTLTRDTSISTVYMEL |
| | | SRLRSDDTAVYYCARDMNILATVPFDIWGQGTMVTVSS |
| CAR123-4 | 2440 | DIQMTQSPSSLSASVGDRVTITCRASQSISSYLNWYQQKPGKAP |
| VL | | KLLIYAASSLQSGVPSRFSGSGSGTDFTLTISSLQPEDFATYYCQ |
| | | QGDSVPLTFGGGTKVEIK |
| CAR123-1 | 2441 | atggccctccctgtcaccgccctgctgcttccgctggctcttctgctccacgccgctcggccccaag |
| NT | | tccaactcgtccagtcaggagcggaagtcaagaagcccggagcgtcagtcaaagtgtcatgcaaa |
| | | gcctcgggctacactttcactgggtactacatgcactgggtgcgccaggctccaggacagggactg |
| | | gaatggatgggatggatcaacccgaactccggtggcaccaattacgcccagaagttccagggga |
| | | gggtgaccatgactcgcgacacgtcgatcagcaccgcatacatggagctgtcaagactccggtcc |
| | | gacgatactgccgtgtactactgcgcacgggacatgaacattctggccaccgtgccttttgacatctg |
| | | gggtcagggaactatggttaccgtgtcctctggtggaggcggctccggcggggggggaagcgga |
| | | ggcggtggaagcgacattcagatgacccagtcgccttcatccctttcggcgagcgtgggagatcg |
| | | cgtcactatcacttgtcgggcctcgcagtccatctccacctacctcaattggtaccagcagaagcca |
| | | ggaaaagcaccgaatctgctgatctacgccgcgttttccttgcaatcgggagtgccaagcagattca |
| | | gcggatcgggatcaggcactgatttcaccctcaccatcaactcgctgcaaccggaggatttcgctac |
| | | gtactattgccaacaaggagacagcgtgccgctcaccttcggcggagggactaagctggaaatca |
| | | agaccactaccccagcaccgaggccacccaccccggctcctaccatcgcctcccagcctctgtcc |
| | | ctgcgtccggaggcatgtagacccgcagctggtggggccgtgcatacccggggtcttgacttcgc |
| | | ctgcgatatctacatttgggcccctctggctggtacttgcggggtcctgctgctttcactcgtgatcact |
| | | ctttactgtaagcgcggtcggaagaagctgctgtacatctttaagcaacccttcatgaggcctgtgca |
| | | gactactcaagaggaggacggctgttcatgccggttcccagaggaggaggaaggcggctgcgaa |
| | | ctgcgcgtgaaattcagccgcagcgcagatgctccagcctacaagcaggggcagaaccagctct |
| | | acaacgaactcaatcttggtcggagagaggagtacgacgtgctggacaagcggagaggacggg |
| | | acccagaaatgggcgggaagccgcgcagaaagaatccccaagagggcctgtacaacgagctcc |
| | | aaaaggataagatggcagaagcctatagcgagattggtatgaaaggggaacgcagaagaggcaa |
| | | aggccacgacggactgtaccagggactcagcaccgccaccaaggacacctatgacgctcttcac |
| | | atgcaggccctgccgcctcgg |
| CAR123-1 | 2442 | malpvtalllplalllhaarpqvqlvqsgaevkkpgasvkvsckasgytftgyymhwvrqapg |
| AA | | qglewmgwinpnsggtnyaqkfqgrvtmtrdtsistaymelsrlrsddtavyycardmnilat |
| | | vpfdiwgqgtmvtvssggggsggggsggggsdiqmtqspsslsasvgdrvtitcrasqsistyl |
| | | nwyqqkpgkapnlliyaafslqsgvpsrfsgsgsgtdftltinslqpedfatyycqqgdsvpltfg |
| | | ggtkleiktttpaprpptpaptiasqp1s1rpeacrpaaggavhtrgldfacdiyiwaplagtcgvll |
| | | lslvitlyckrgrkkllyifkqpfmrpvqttqeedgcscrfpeeeeggcelrvkfsrsadapaykq |
| | | gqnqlynelnlgrreeydvldkrrgrdpemggkprrknpqeglynelqkdkmaeayseigm |
| | | kgerrrgkghdglyqglstatkdtydalhmqalppr |
| CAR123-1 | 2443 | malpvtalllplalllhaarpqvqlvqsgaevkkpgasvkvsckasgytftgyymhwvrqapg |
| scFv | | qglewmgwinpnsggtnyaqkfqgrvtmtrdtsistaymelsrlrsddtavyycardmnilat |
| | | vpfdiwgqgtmvtvssggggsggggsggggsdiqmtqspsslsasvgdrvtitcrasqsistyl |
| | | nwyqqkpgkapnlliyaafslqsgvpsrfsgsgsgtdftltinslqpedfatyycqqgdsvpltfg |
| | | ggtkleik |
| CAR123-1 | 2444 | QVQLVQSGAEVKKPGASVKVSCKASGYTFTGYYMHWVRQAP |
| VH | | GQGLEWMGWINPNSGGTNYAQKFQGRVTMTRDTSISTAYME |
| | | LSRLRSDDTAVYYCARDMNILATVPFDIWGQGTMVTVSS |
| CAR123-1 | 2445 | DIQMTQSPSSLSASVGDRVTITCRASQSISTYLNWYQQKPGKAP |
| VL | | NLLIYAAFSLQSGVPSRFSGSGSGTDFTLTINSLQPEDFATYYCQ |
| | | QGDSVPLTFGGGTKLEIK |

TABLE 27
Humanized CD123 CAR Sequences

| | SEQ | |
|---|---|---|
| Name | ID | Sequence |
| hzCAR123-1 | 2446 | ATGGCCCTCCCTGTCACCGCCCTGCTGCTTCCGCTGGCTCTTCTG |
| NT | | CTCCACGCCGCTCGGCCCCAAGTGCAGCTGGTCCAGTCGGGAGC |
| | | CGAAGTCAAGAAGCCCGGCGCTAGCGTGAAAGTGTCCTGCAAAG |
| | | CCTCCGGGTACACATTCACCTCCTACTGGATGAATTGGGTCAGAC |
| | | AGGCGCCCGGCCAGGGACTCGAGTGGATGGGAAGGATTGATCCT |
| | | TACGACTCCGAAACCCATTACAACCAGAAGTTCAAGGACCGCGT |
| | | GACCATGACTGTGGATAAGTCCACTTCCACCGCTTACATGGAGCT |
| | | GTCCAGCCTGCGCTCCGAGGATACCGCAGTGTACTACTGCGCCC |
| | | GGGGAAACTGGGACGACTATTGGGGACAGGGAACTACCGTGAC |
| | | CGTGTCAAGCGGGGGTGGCGGTAGCGGAGGAGGGGGCTCCGGC |
| | | GGCGGCGGCTCAGGGGGCGGAGGAAGCGACGTGCAGCTCACCC |
| | | AGTCGCCCTCATTTCTGTCGGCCTCAGTGGGAGACAGAGTGACC |
| | | ATTACTTGTCGGGCCTCCAAGAGCATCTCCAAGGACCTGGCCTG |
| | | GTATCAGCAGAAGCCAGGAAAGGCGCCTAAGTTGCTCATCTACT |
| | | CGGGGTCGACCCTGCAATCTGGCGTGCCGTCCCGGTTCTCCGGTT |
| | | CGGGAAGCGGTACCGAATTCACCCTTACTATCTCCTCCCTGCAAC |
| | | CGGAGGACTTCGCCACCTACTACTGCCAACAGCACAACAAGTAC |
| | | CCGTACACTTTCGGGGGTGGCACGAAGGTCGAAATCAAGACCAC |
| | | TACCCCAGCACCGAGGCCACCCACCCCGGCTCCTACCATCGCCTC |
| | | CCAGCCTCTGTCCCTGCGTCCGGAggcatgtagacccgcagctggtggggccgtgc |
| | | atacccggggtcttgacttcgcctgcgatatctacatttgggcccctctggctggtacttgcggggtcctgctg |
| | | ctttcactcgtgatcactctttactgtaagcgcggtcggaagaagctgctgtacatctttaagcaacccttcatg |
| | | aggcctgtgcagactactcaagaggaggacggctgttcatgccggttcccagaggaggaggaaggcggc |
| | | tgcgaactgcgcgtgaaattcagccgcagcgcagatgctccagcctacaagcaggggcagaaccagctct |
| | | acaacgaactcaatcttggtcggagagaggagtacgacgtgctggacaagcggagaggacgggaccca |
| | | gaaatgggcgggaagccgcgcagaaagaatccccaagagggcctgtacaacgagctccaaaaggataa |
| | | gatggcagaagcctatagcgagattggtatgaaaggggaacgcagaagaggcaaaggccacgacggac |
| | | tgtaccagggactcagcaccgccaccaaggacacctatgacgctcttcacatgcaggccctgccgcctcg |
| | | g |
| hzCAR123-1 | 2447 | MALPVTALLLPLALLLHAARPQVQLVQSGAEVKKPGASVKVSCKA |
| AA | | SGYTFTSYWMNWVRQAPGQGLEWMGRIDPYDSETHYNQKFKDRV |
| | | TMTVDKSTSTAYMELSSLRSEDTAVYYCARGNWDDYWGQGTTVT |
| | | VSSGGGGSGGGGSGGGGSGGGGSDVQLTQSPSFLSASVGDRVTITC |
| | | RASKSISKDLAWYQQKPGKAPKLLIYSGSTLQSGVPSRFSGSGSGTE |
| | | FTLTISSLQPEDFATYYCQQHNKYPYTFGGGTKVEIKTTTPAPRPPTP |
| | | APTIASQPLSLRPEACRPAAGGAVHTRGLDFACDIYIWAPLAGTCGV |
| | | LLLSLVITLYCKRGRKKLLYIFKQPFMRPVQTTQEEDGCSCRFPEEEE |
| | | GGCELRVKFSRSADAPAYKQGQNQLYNELNLGRREEYDVLDKRRG |
| | | RDPEMGGKPRRKNPQEGLYNELQKDKMAEAYSEIGMKGERRRGK |
| | | GHDGLYQGLSTATKDTYDALHMQALPPR |
| hzCAR123-1 | 2448 | MALPVTALLLPLALLLHAARPQVQLVQSGAEVKKPGASVKVSCKA |
| scFv | | SGYTFTSYWMNWVRQAPGQGLEWMGRIDPYDSETHYNQKFKDRV |
| | | TMTVDKSTSTAYMELSSLRSEDTAVYYCARGNWDDYWGQGTTVT |
| | | VSSGGGGSGGGGSGGGGSGGGGSDVQLTQSPSFLSASVGDRVTITC |
| | | RASKSISKDLAWYQQKPGKAPKLLIYSGSTLQSGVPSRFSGSGSGTE |
| | | FTLTISSLQPEDFATYYCQQHNKYPYTFGGGTKVEIK |
| hzCAR123-1 | 2449 | QVQLVQSGAEVKKPGASVKVSCKASGYTFTSYWMNWVRQAPGQG |
| VH | | LEWMGRIDPYDSETHYNQKFKDRVTMTVDKSTSTAYMELSSLRSE |
| | | DTAVYYCARGNWDDYWGQGTTVTVSS |
| hzCAR123-1 | 2450 | DVQLTQSPSFLSASVGDRVTITCRASKSISKDLAWYQQKPGKAPKLL |
| VL | | IYSGSTLQSGVPSRFSGSGSGTEFTLTISSLQPEDFATYYCQQHNKYP |
| | | YTFGGGTKVEIK |
| hzCAR123-2 | 2451 | ATGGCCCTCCCTGTCACCGCCCTGCTGCTTCCGCTGGCTCTTCTG |
| NT | | CTCCACGCCGCTCGGCCCCAAGTGCAGCTGGTCCAGTCGGGAGC |
| | | CGAAGTCAAGAAGCCCGGCGCTAGCGTGAAAGTGTCCTGCAAAG |
| | | CCTCCGGGTACACATTCACCTCCTACTGGATGAATTGGGTCAGAC |
| | | AGGCGCCCGGCCAGGGACTCGAGTGGATGGGAAGGATTGATCCT |
| | | TACGACTCCGAAACCCATTACAACCAGAAGTTCAAGGACCGCGT |
| | | GACCATGACTGTGGATAAGTCCACTTCCACCGCTTACATGGAGCT |
| | | GTCCAGCCTGCGCTCCGAGGATACCGCAGTGTACTACTGCGCCC |
| | | GGGGAAACTGGGACGACTATTGGGGACAGGGAACTACCGTGAC |
| | | CGTGTCAAGCGGGGGTGGCGGTAGCGGAGGAGGGGGCTCCGGC |
| | | GGCGGCGGCTCAGGGGGCGGAGGAAGCGAAGTGGTGCTGACCC |
| | | AGTCGCCCGCAACCCTCTCTCTGTCGCCGGGAGAACGCGCCACT |
| | | CTTTCCTGTCGGGCGTCCAAGAGCATCTCAAAGGACCTCGCCTGG |
| | | TACCAGCAGAAGCCTGGTCAAGCCCCGCGGCTGCTGATCTACTC |
| | | CGGCTCCACGCTGCAATCAGGAATCCCAGCCAGATTTTCCGGTTC |
| | | GGGGTCGGGGACTGACTTCACCTTGACCATTAGCTCGCTGGAAC |
| | | CTGAGGACTTCGCCGTGTATTACTGCCAGCAGCACAACAAGTAC |
| | | CCGTACACCTTCGGAGGCGGTACTAAGGTCGAGATCAAGACCAC |
| | | TACCCCAGCACCGAGGCCACCCACCCCGGCTCCTACCATCGCCTC |
| | | CCAGCCTCTGTCCCTGCGTCCGGAggcatgtagacccgcagctggtggggccgtgc |
| | | atacccggggtcttgacttcgcctgcgatatctacatttgggcccctctggctggtacttgcggggtcctgctg |
| | | ctttcactcgtgatcactctttactgtaagcgcggtcggaagaagctgctgtacatctttaagcaacccttcatg |
| | | aggcctgtgcagactactcaagaggaggacggctgttcatgccggttcccagaggaggaggaaggcggc |
| | | tgcgaactgcgcgtgaaattcagccgcagcgcagatgctccagcctacaagcaggggcagaaccagctct |
| | | acaacgaactcaatcttggtcggagagaggagtacgacgtgctggacaagcggagaggacgggaccca |
| | | gaaatgggcgggaagccgcgcagaaagaatccccaagagggcctgtacaacgagctccaaaaggataa |
| | | gatggcagaagcctatagcgagattggtatgaaaggggaacgcagaagaggcaaaggccacgacggac |
| | | tgtaccagggactcagcaccgccaccaaggacacctatgacgctcttcacatgcaggccctgccgcctcg |
| | | g |
| hzCAR123-2 | 2452 | MALPVTALLLPLALLLHAARPQVQLVQSGAEVKKPGASVKVSCKA |
| AA | | SGYTFTSYWMNWVRQ |
| | | APGQGLEWMGRIDPYDSETHYNQKFKDRVTMTVDKSTSTAYMELS |
| | | SLRSEDTAVYYCARG |
| | | NWDDYWGQGTTVTVSSGGGGSGGGGSGGGGSGGGGSEVVLTQSP |
| | | ATLSLSPGERATLSCR |
| | | ASKSISKDLAWYQQKPGQAPRLLIYSGSTLQSGIPARFSGSGSGTDFT |
| | | LTISSLEPEDFA |
| | | VYYCQQHNKYPYTFGGGTKVEIKTTTPAPRPPTPAPTIASQPLSLRPE |
| | | ACRPAAGGAVHT |
| | | RGLDFACDIYIWAPLAGTCGVLLLSLVITLYCKRGRKKLLYIFKQPF |
| | | MRPVQTTQEEDGC |
| | | SCRFPEEEEGGCELRVKFSRSADAPAYKQGQNQLYNELNLGRREEY |
| | | DVLDKRRGRDPEMG |
| | | GKPRRKNPQEGLYNELQKDKMAEAYSEIGMKGERRRGKGHDGLY |
| | | QGLSTATKDTYDALHM |
| | | QALPPR |
| hzCAR123-2 | 2453 | MALPVTALLLPLALLLHAARPQVQLVQSGAEVKKPGASVKVSCKA |
| scFv | | SGYTFTSYWMNWVRQ |
| | | APGQGLEWMGRIDPYDSETHYNQKFKDRVTMTVDKSTSTAYMELS |
| | | SLRSEDTAVYYCARG |
| | | NWDDYWGQGTTVTVSSGGGGSGGGGSGGGGSGGGGSEVVLTQSP |
| | | ATLSLSPGERATLSCR |
| | | ASKSISKDLAWYQQKPGQAPRLLIYSGSTLQSGIPARFSGSGSGTDFT |
| | | LTISSLEPEDFA |
| | | VYYCQQHNKYPYTFGGGTKVEIK |
| hzCAR123-2 | 2449 | QVQLVQSGAEVKKPGASVKVSCKASGYTFTSYWMNWVRQAPGQG |
| VH | | LEWMGRIDPYDSETHYNQKFKDRVTMTVDKSTSTAYMELSSLRSE |
| | | DTAVYYCARGNWDDYWGQGTTVTVSS |
| hzCAR123-2 | 2454 | EVVLTQSPATLSLSPGERATLSCRASKSISKDLAWYQQKPGQAPRLL |
| VL | | IYSGSTLQSGIPARFSGSGSGTDFTLTISSLEPEDFAVYYCQQHNKYP |
| | | YTFGGGTKVEIK |
| hzCAR123-3 | 2455 | ATGGCCCTCCCTGTCACCGCCCTGCTGCTTCCGCTGGCTCTTCTG |
| NT | | CTCCACGCCGCTCGGCCCCAAGTGCAGCTGGTCCAGTCGGGAGC |
| | | CGAAGTCAAGAAGCCCGGCGCTAGCGTGAAAGTGTCCTGCAAAG |
| | | CCTCCGGGTACACATTCACCTCCTACTGGATGAATTGGGTCAGAC |
| | | AGGCGCCCGGCCAGGGACTCGAGTGGATGGGAAGGATTGATCCT |
| | | TACGACTCCGAAACCCATTACAACCAGAAGTTCAAGGACCGCGT |
| | | GACCATGACTGTGGATAAGTCCACTTCCACCGCTTACATGGAGCT |
| | | GTCCAGCCTGCGCTCCGAGGATACCGCAGTGTACTACTGCGCCC |
| | | GGGGAAACTGGGACGACTATTGGGGACAGGGAACTACCGTGAC |
| | | CGTGTCAAGCGGGGGTGGCGGTAGCGGAGGAGGGGGCTCCGGC |
| | | GGCGGCGGCTCAGGGGGCGGAGGAAGCGACGTCGTGATGACCC |
| | | AGTCACCGGCATTCCTGTCCGTGACTCCCGGAGAAAAGGTCACG |
| | | ATTACTTGCCGGGCGTCCAAGAGCATCTCCAAGGACCTCGCCTG |
| | | GTACCAACAGAAGCCGGACCAGGCCCCTAAGCTGTTGATCTACT |
| | | CGGGGTCCACCCTTCAATCGGGAGTGCCATCGCGGTTTAGCGGTT |
| | | CGGGTTCTGGGACCGACTTCACTTTCACCATCTCCTCACTGGAAG |
| | | CCGAGGATGCCGCCACTTACTACTGTCAGCAGCACAACAAGTAT |
| | | CCGTACACCTTCGGAGGCGGTACCAAAGTGGAGATCAAGACCAC |
| | | TACCCCAGCACCGAGGCCACCCACCCCGGCTCCTACCATCGCCTC |
| | | CCAGCCTCTGTCCCTGCGTCCGGAggcatgtagacccgcagctggtggggccgtgc |
| | | atacccggggtcttgacttcgcctgcgatatctacatttgggcccctctggctggtacttgcggggtcctgctg |
| | | ctttcactcgtgatcactctttactgtaagcgcggtcggaagaagctgctgtacatctttaagcaacccttcatg |
| | | aggcctgtgcagactactcaagaggaggacggctgttcatgccggttcccagaggaggaggaaggcggc |
| | | tgcgaactgcgcgtgaaattcagccgcagcgcagatgctccagcctacaagcaggggcagaaccagctct |
| | | acaacgaactcaatcttggtcggagagaggagtacgacgtgctggacaagcggagaggacgggaccca |
| | | gaaatgggcgggaagccgcgcagaaagaatccccaagagggcctgtacaacgagctccaaaaggataa |
| | | gatggcagaagcctatagcgagattggtatgaaaggggaacgcagaagaggcaaaggccacgacggac |
| | | tgtaccagggactcagcaccgccaccaaggacacctatgacgctcttcacatgcaggccctgccgcctcg |
| | | g |
| hzCAR123-3 | 2456 | MALPVTALLLPLALLLHAARPQVQLVQSGAEVKKPGASVKVSCKA |
| AA | | SGYTFTSYWMNWVRQ |
| | | APGQGLEWMGRIDPYDSETHYNQKFKDRVTMTVDKSTSTAYMELS |
| | | SLRSEDTAVYYCARG |
| | | NWDDYWGQGTTVTVSSGGGGSGGGGSGGGGSGGGGSDVVMTQS |
| | | PAFLSVTPGEKVTITCR |
| | | ASKSISKDLAWYQQKPDQAPKLLIYSGSTLQSGVPSRFSGSGSGTDF |
| | | TFTISSLEAEDAA |
| | | TYYCQQHNKYPYTFGGGTKVEIKTTTPAPRPPTPAPTIASQPLSLRPE |
| | | ACRPAAGGAVHT |
| | | RGLDFACDIYIWAPLAGTCGVLLLSLVITLYCKRGRKKLLYIFKQPF |
| | | MRPVQTTQEEDGC |
| | | SCRFPEEEEGGCELRVKFSRSADAPAYKQGQNQLYNELNLGRREEY |
| | | DVLDKRRGRDPEMG |
| | | GKPRRKNPQEGLYNELQKDKMAEAYSEIGMKGERRRGKGHDGLY |
| | | QGLSTATKDTYDALHM |
| | | QALPPR |
| hzCAR123-3 | 2457 | MALPVTALLLPLALLLHAARPQVQLVQSGAEVKKPGASVKVSCKA |
| scFv | | SGYTFTSYWMNWVRQ |
| | | APGQGLEWMGRIDPYDSETHYNQKFKDRVTMTVDKSTSTAYMELS |
| | | SLRSEDTAVYYCARG |
| | | NWDDYWGQGTTVTVSSGGGGSGGGGSGGGGSGGGGSDVVMTQS |
| | | PAFLSVTPGEKVTITCR |
| | | ASKSISKDLAWYQQKPDQAPKLLIYSGSTLQSGVPSRFSGSGSGTDF |
| | | TFTISSLEAEDAA |
| | | TYYCQQHNKYPYTFGGGTKVEIK |
| hzCAR123-3 | 2449 | QVQLVQSGAEVKKPGASVKVSCKASGYTFTSYWMNWVRQAPGQG |
| VH | | LEWMGRIDPYDSETHYNQKFKDRVTMTVDKSTSTAYMELSSLRSE |
| | | DTAVYYCARGNWDDYWGQGTTVTVSS |
| hzCAR123-3 | 2458 | DVVMTQSPAFLSVTPGEKVTITCRASKSISKDLAWYQQKPDQAPKL |
| VL | | LIYSGSTLQSGVPSRFSGSGSGTDFTFTISSLEAEDAATYYCQQHNKY |
| | | PYTFGGGTKVEIK |
| hzCAR123-4 | 2459 | ATGGCCCTCCCTGTCACCGCCCTGCTGCTTCCGCTGGCTCTTCTG |
| NT | | CTCCACGCCGCTCGGCCCCAAGTGCAGCTGGTCCAGTCGGGAGC |
| | | CGAAGTCAAGAAGCCCGGCGCTAGCGTGAAAGTGTCCTGCAAAG |
| | | CCTCCGGGTACACATTCACCTCCTACTGGATGAATTGGGTCAGAC |
| | | AGGCGCCCGGCCAGGGACTCGAGTGGATGGGAAGGATTGATCCT |
| | | TACGACTCCGAAACCCATTACAACCAGAAGTTCAAGGACCGCGT |
| | | GACCATGACTGTGGATAAGTCCACTTCCACCGCTTACATGGAGCT |
| | | GTCCAGCCTGCGCTCCGAGGATACCGCAGTGTACTACTGCGCCC |
| | | GGGGAAACTGGGACGACTATTGGGGACAGGGAACTACCGTGAC |
| | | CGTGTCAAGCGGGGGTGGCGGTAGCGGAGGAGGGGGCTCCGGC |
| | | GGCGGCGGCTCAGGGGGCGGAGGAAGCGACGTGGTCATGACTC |
| | | AGTCCCCGGACTCACTCGCGGTGTCGCTTGGAGAGAGAGCGACC |
| | | ATCAACTGTCGGGCCTCAAAGAGCATCAGCAAGGACCTGGCCTG |
| | | GTACCAGCAGAAGCCGGGACAGCCGCCAAAGCTGCTGATCTACT |
| | | CCGGGTCCACCTTGCAATCTGGTGTCCCTGACCGGTTCTCCGGTT |
| | | CCGGGTCGGGTACCGACTTCACGCTCACTATTTCGTCGCTGCAAG |
| | | CCGAAGATGTGGCCGTGTACTATTGCCAACAGCACAACAAGTAC |
| | | CCCTACACTTTTGGCGGAGGCACCAAGGTGGAAATCAAGACCAC |
| | | TACCCCAGCACCGAGGCCACCCACCCCGGCTCCTACCATCGCCTC |
| | | CCAGCCTCTGTCCCTGCGTCCGGAggcatgtagacccgcagctggtggggccgtgc |
| | | atacccggggtcttgacttcgcctgcgatatctacatttgggcccctctggctggtacttgcggggtcctgctg |
| | | ctttcactcgtgatcactctttactgtaagcgcggtcggaagaagctgctgtacatctttaagcaacccttcatg |
| | | aggcctgtgcagactactcaagaggaggacggctgttcatgccggttcccagaggaggaggaaggcggc |
| | | tgcgaactgcgcgtgaaattcagccgcagcgcagatgctccagcctacaagcaggggcagaaccagctct |
| | | acaacgaactcaatcttggtcggagagaggagtacgacgtgctggacaagcggagaggacgggaccca |
| | | gaaatgggcgggaagccgcgcagaaagaatccccaagagggcctgtacaacgagctccaaaaggataa |
| | | gatggcagaagcctatagcgagattggtatgaaaggggaacgcagaagaggcaaaggccacgacggac |
| | | tgtaccagggactcagcaccgccaccaaggacacctatgacgctcttcacatgcaggccctgccgcctcg |
| | | g |
| hzCAR123-4 | 2460 | MALPVTALLLPLALLLHAARPQVQLVQSGAEVKKPGASVKVSCKA |
| AA | | SGYTFTSYWMNWVRQ |
| | | APGQGLEWMGRIDPYDSETHYNQKFKDRVTMTVDKSTSTAYMELS |
| | | SLRSEDTAVYYCARG |
| | | NWDDYWGQGTTVTVSSGGGGSGGGGSGGGGSGGGGSDVVMTQS |
| | | PDSLAVSLGERATINCR |
| | | ASKSISKDLAWYQQKPGQPPKLLIYSGSTLQSGVPDRFSGSGSGTDF |
| | | TLTISSLQAEDVA |
| | | VYYCQQHNKYPYTFGGGTKVEIKTTTPAPRPPTPAPTIASQPLSLRPE |
| | | ACRPAAGGAVHT |
| | | RGLDFACDIYIWAPLAGTCGVLLLSLVITLYCKRGRKKLLYIFKQPF |
| | | MRPVQTTQEEDGC |
| | | SCRFPEEEEGGCELRVKFSRSADAPAYKQGQNQLYNELNLGRREEY |
| | | DVLDKRRGRDPEMG |
| | | GKPRRKNPQEGLYNELQKDKMAEAYSEIGMKGERRRGKGHDGLY |
| | | QGLSTATKDTYDALHM |
| | | QALPPR |
| hzCAR123-4 | 2461 | MALPVTALLLPLALLLHAARPQVQLVQSGAEVKKPGASVKVSCKA |
| scFv | | SGYTFTSYWMNWVRQ |
| | | APGQGLEWMGRIDPYDSETHYNQKFKDRVTMTVDKSTSTAYMELS |
| | | SLRSEDTAVYYCARG |
| | | NWDDYWGQGTTVTVSSGGGGSGGGGSGGGGSGGGGSDVVMTQS |
| | | PDSLAVSLGERATINCR |
| | | ASKSISKDLAWYQQKPGQPPKLLIYSGSTLQSGVPDRFSGSGSGTDF |
| | | TLTISSLQAEDVA |
| | | VYYCQQHNKYPYTFGGGTKVEIK |
| hzCAR123-4 | 2449 | QVQLVQSGAEVKKPGASVKVSCKASGYTFTSYWMNWVRQAPGQG |
| VH | | LEWMGRIDPYDSETHYNQKFKDRVTMTVDKSTSTAYMELSSLRSE |
| | | DTAVYYCARGNWDDYWGQGTTVTVSS |
| hzCAR123-4 | 2462 | DVVMTQSPDSLAVSLGERATINCRASKSISKDLAWYQQKPGQPPKL |
| VL | | LIYSGSTLQSGVPDRFSGSGSGTDFTLTISSLQAEDVAVYYCQQHNK |
| | | YPYTFGGGTKVEIK |
| hzCAR123-5 | 2463 | ATGGCCCTCCCTGTCACCGCCCTGCTGCTTCCGCTGGCTCTTCTG |
| NT | | CTCCACGCCGCTCGGCCCGACGTGCAGCTCACCCAGTCGCCCTCA |
| | | TTTCTGTCGGCCTCAGTGGGAGACAGAGTGACCATTACTTGTCGG |
| | | GCCTCCAAGAGCATCTCCAAGGACCTGGCCTGGTATCAGCAGAA |
| | | GCCAGGAAAGGCGCCTAAGTTGCTCATCTACTCGGGGTCGACCC |
| | | TGCAATCTGGCGTGCCGTCCCGGTTCTCCGGTTCGGGAAGCGGTA |
| | | CCGAATTCACCCTTACTATCTCCTCCCTGCAACCGGAGGACTTCG |
| | | CCACCTACTACTGCCAACAGCACAACAAGTACCCGTACACTTTC |
| | | GGGGGTGGCACGAAGGTCGAAATCAAGGGGGGTGGCGGTAGCG |
| | | GAGGAGGGGGCTCCGGCGGCGGCGGCTCAGGGGGCGGAGGAAG |
| | | CCAAGTGCAGCTGGTCCAGTCGGGAGCCGAAGTCAAGAAGCCCG |
| | | GCGCTAGCGTGAAAGTGTCCTGCAAAGCCTCCGGGTACACATTC |
| | | ACCTCCTACTGGATGAATTGGGTCAGACAGGCGCCCGGCCAGGG |
| | | ACTCGAGTGGATGGGAAGGATTGATCCTTACGACTCCGAAACCC |
| | | ATTACAACCAGAAGTTCAAGGACCGCGTGACCATGACTGTGGAT |
| | | AAGTCCACTTCCACCGCTTACATGGAGCTGTCCAGCCTGCGCTCC |
| | | GAGGATACCGCAGTGTACTACTGCGCCCGGGGAAACTGGGACGA |
| | | CTATTGGGGACAGGGAACTACCGTGACCGTGTCAAGCACCACTA |
| | | CCCCAGCACCGAGGCCACCCACCCCGGCTCCTACCATCGCCTCCC |
| | | AGCCTCTGTCCCTGCGTCCGGAggcatgtagacccgcagctggtggggccgtgcata |
| | | cccggggtcttgacttcgcctgcgatatctacatttgggcccctctggctggtacttgcggggtcctgctgcttt |
| | | cactcgtgatcactctttactgtaagcgcggtcggaagaagctgctgtacatctttaagcaacccttcatgagg |
| | | cctgtgcagactactcaagaggaggacggctgttcatgccggttcccagaggaggaggaaggcggctgc |
| | | gaactgcgcgtgaaattcagccgcagcgcagatgctccagcctacaagcaggggcagaaccagctctac |
| | | aacgaactcaatcttggtcggagagaggagtacgacgtgctggacaagcggagaggacgggacccaga |
| | | aatgggcgggaagccgcgcagaaagaatccccaagagggcctgtacaacgagctccaaaaggataaga |
| | | tggcagaagcctatagcgagattggtatgaaaggggaacgcagaagaggcaaaggccacgacggactgt |
| | | accagggactcagcaccgccaccaaggacacctatgacgctcttcacatgcaggccctgccgcctcgg |
| hzCAR123-5 | 2464 | MALPVTALLLPLALLLHAARPDVQLTQSPSFLSASVGDRVTITCRAS |
| AA | | KSISKDLAWYQQK |
| | | PGKAPKLLIYSGSTLQSGVPSRFSGSGSGTEFTLTISSLQPEDFATYYC |
| | | QQHNKYPYTFG |
| | | GGTKVEIKGGGGSGGGGSGGGGSGGGGSQVQLVQSGAEVKKPGAS |
| | | VKVSCKASGYTFTSY |
| | | WMNWVRQAPGQGLEWMGRIDPYDSETHYNQKFKDRVTMTVDKS |
| | | TSTAYMELSSLRSEDTA |
| | | VYYCARGNWDDYWGQGTTVTVSSTTTPAPRPPTPAPTIASQPLSLR |
| | | PEACRPAAGGAVHT |
| | | RGLDFACDIYIWAPLAGTCGVLLLSLVITLYCKRGRKKLLYIFKQPF |
| | | MRPVQTTQEEDGC |
| | | SCRFPEEEEGGCELRVKFSRSADAPAYKQGQNQLYNELNLGRREEY |
| | | DVLDKRRGRDPEMG |
| | | GKPRRKNPQEGLYNELQKDKMAEAYSEIGMKGERRRGKGHDGLY |
| | | QGLSTATKDTYDALHM |
| | | QALPPR |
| hzCAR123-5 | 2465 | MALPVTALLLPLALLLHAARPDVQLTQSPSFLSASVGDRVTITCRAS |
| scFv | | KSISKDLAWYQQK |
| | | PGKAPKLLIYSGSTLQSGVPSRFSGSGSGTEFTLTISSLQPEDFATYYC |
| | | QQHNKYPYTFG |
| | | GGTKVEIKGGGGSGGGGSGGGGSGGGGSQVQLVQSGAEVKKPGAS |
| | | VKVSCKASGYTFTSY |
| | | WMNWVRQAPGQGLEWMGRIDPYDSETHYNQKFKDRVTMTVDKS |
| | | TSTAYMELSSLRSEDTA |
| | | VYYCARGNWDDYWGQGTTVTVSS |
| hzCAR123-5 | 2449 | QVQLVQSGAEVKKPGASVKVSCKASGYTFTSYWMNWVRQAPGQG |
| VH | | LEWMGRIDPYDSETHYNQKFKDRVTMTVDKSTSTAYMELSSLRSE |
| | | DTAVYYCARGNWDDYWGQGTTVTVSS |
| hzCAR123-5 | 2450 | DVQLTQSPSFLSASVGDRVTITCRASKSISKDLAWYQQKPGKAPKLL |
| VL | | IYSGSTLQSGVPSRFSGSGSGTEFTLTISSLQPEDFATYYCQQHNKYP |
| | | YTFGGGTKVEIK |
| hzCAR123-6 | 2466 | ATGGCCCTCCCTGTCACCGCCCTGCTGCTTCCGCTGGCTCTTCTG |
| NT | | CTCCACGCCGCTCGGCCCGAAGTGGTGCTGACCCAGTCGCCCGC |
| | | AACCCTCTCTCTGTCGCCGGGAGAACGCGCCACTCTTTCCTGTCG |
| | | GGCGTCCAAGAGCATCTCAAAGGACCTCGCCTGGTACCAGCAGA |
| | | AGCCTGGTCAAGCCCCGCGGCTGCTGATCTACTCCGGCTCCACGC |
| | | TGCAATCAGGAATCCCAGCCAGATTTTCCGGTTCGGGGTCGGGG |
| | | ACTGACTTCACCTTGACCATTAGCTCGCTGGAACCTGAGGACTTC |
| | | GCCGTGTATTACTGCCAGCAGCACAACAAGTACCCGTACACCTT |
| | | CGGAGGCGGTACTAAGGTCGAGATCAAGGGGGGTGGCGGTAGC |
| | | GGAGGAGGGGGCTCCGGCGGCGGCGGCTCAGGGGGCGGAGGAA |
| | | GCCAAGTGCAGCTGGTCCAGTCGGGAGCCGAAGTCAAGAAGCCC |
| | | GGCGCTAGCGTGAAAGTGTCCTGCAAAGCCTCCGGGTACACATT |
| | | CACCTCCTACTGGATGAATTGGGTCAGACAGGCGCCCGGCCAGG |
| | | GACTCGAGTGGATGGGAAGGATTGATCCTTACGACTCCGAAACC |
| | | CATTACAACCAGAAGTTCAAGGACCGCGTGACCATGACTGTGGA |
| | | TAAGTCCACTTCCACCGCTTACATGGAGCTGTCCAGCCTGCGCTC |
| | | CGAGGATACCGCAGTGTACTACTGCGCCCGGGGAAACTGGGACG |
| | | ACTATTGGGGACAGGGAACTACCGTGACCGTGTCAAGCACCACT |
| | | ACCCCAGCACCGAGGCCACCCACCCCGGCTCCTACCATCGCCTC |
| | | CCAGCCTCTGTCCCTGCGTCCGGAggcatgtagacccgcagctggtggggccgtgc |
| | | atacccggggtcttgacttcgcctgcgatatctacatttgggcccctctggctggtacttgcggggtcctgctg |
| | | ctttcactcgtgatcactctttactgtaagcgcggtcggaagaagctgctgtacatctttaagcaacccttcatg |
| | | aggcctgtgcagactactcaagaggaggacggctgttcatgccggttcccagaggaggaggaaggcggc |
| | | tgcgaactgcgcgtgaaattcagccgcagcgcagatgctccagcctacaagcaggggcagaaccagctct |
| | | acaacgaactcaatcttggtcggagagaggagtacgacgtgctggacaagcggagaggacgggaccca |
| | | gaaatgggcgggaagccgcgcagaaagaatccccaagagggcctgtacaacgagctccaaaaggataa |
| | | gatggcagaagcctatagcgagattggtatgaaaggggaacgcagaagaggcaaaggccacgacggac |
| | | tgtaccagggactcagcaccgccaccaaggacacctatgacgctcttcacatgcaggccctgccgcctcg |
| | | g |
| hzCAR123-6 | 2467 | MALPVTALLLPLALLLHAARPEVVLTQSPATLSLSPGERATLSCRAS |
| AA | | KSISKDLAWYQQK |
| | | PGQAPRLLIYSGSTLQSGIPARFSGSGSGTDFTLTISSLEPEDFAVYYC |
| | | QQHNKYPYTFG |
| | | GGTKVEIKGGGGSGGGGSGGGGSGGGGSQVQLVQSGAEVKKPGAS |
| | | VKVSCKASGYTFTSY |
| | | WMNWVRQAPGQGLEWMGRIDPYDSETHYNQKFKDRVTMTVDKS |
| | | TSTAYMELSSLRSEDTA |
| | | VYYCARGNWDDYWGQGTTVTVSSTTTPAPRPPTPAPTIASQPLSLR |
| | | PEACRPAAGGAVHT |
| | | RGLDFACDIYIWAPLAGTCGVLLLSLVITLYCKRGRKKLLYIFKQPF |
| | | MRPVQTTQEEDGC |
| | | SCRFPEEEEGGCELRVKFSRSADAPAYKQGQNQLYNELNLGRREEY |
| | | DVLDKRRGRDPEMG |
| | | GKPRRKNPQEGLYNELQKDKMAEAYSEIGMKGERRRGKGHDGLY |
| | | QGLSTATKDTYDALHM |
| | | QALPPR |
| hzCAR123-6 | 2468 | MALPVTALLLPLALLLHAARPEVVLTQSPATLSLSPGERATLSCRAS |
| scFv | | KSISKDLAWYQQK |
| | | PGQAPRLLIYSGSTLQSGIPARFSGSGSGTDFTLTISSLEPEDFAVYYC |
| | | QQHNKYPYTFG |
| | | GGTKVEIKGGGGSGGGGSGGGGSGGGGSQVQLVQSGAEVKKPGAS |
| | | VKVSCKASGYTFTSY |
| | | WMNWVRQAPGQGLEWMGRIDPYDSETHYNQKFKDRVTMTVDKS |
| | | TSTAYMELSSLRSEDTA |
| | | VYYCARGNWDDYWGQGTTVTVSS |
| hzCAR123-6 | 2449 | QVQLVQSGAEVKKPGASVKVSCKASGYTFTSYWMNWVRQAPGQG |
| VH | | LEWMGRIDPYDSETHYNQKFKDRVTMTVDKSTSTAYMELSSLRSE |
| | | DTAVYYCARGNWDDYWGQGTTVTVSS |
| hzCAR123-6 | 2454 | EVVLTQSPATLSLSPGERATLSCRASKSISKDLAWYQQKPGQAPRLL |
| VL | | IYSGSTLQSGIPARFSGSGSGTDFTLTISSLEPEDFAVYYCQQHNKYP |
| | | YTFGGGTKVEIK |
| hzCAR123-7 | 2469 | ATGGCCCTCCCTGTCACCGCCCTGCTGCTTCCGCTGGCTCTTCTG |
| NT | | CTCCACGCCGCTCGGCCCGACGTCGTGATGACCCAGTCACCGGC |
| | | ATTCCTGTCCGTGACTCCCGGAGAAAAGGTCACGATTACTTGCCG |
| | | GGCGTCCAAGAGCATCTCCAAGGACCTCGCCTGGTACCAACAGA |
| | | AGCCGGACCAGGCCCCTAAGCTGTTGATCTACTCGGGGTCCACC |
| | | CTTCAATCGGGAGTGCCATCGCGGTTTAGCGGTTCGGGTTCTGGG |
| | | ACCGACTTCACTTTCACCATCTCCTCACTGGAAGCCGAGGATGCC |
| | | GCCACTTACTACTGTCAGCAGCACAACAAGTATCCGTACACCTTC |
| | | GGAGGCGGTACCAAAGTGGAGATCAAGGGGGGTGGCGGTAGCG |
| | | GAGGAGGGGGCTCCGGCGGCGGCGGCTCAGGGGGCGGAGGAAG |
| | | CCAAGTGCAGCTGGTCCAGTCGGGAGCCGAAGTCAAGAAGCCCG |
| | | GCGCTAGCGTGAAAGTGTCCTGCAAAGCCTCCGGGTACACATTC |
| | | ACCTCCTACTGGATGAATTGGGTCAGACAGGCGCCCGGCCAGGG |
| | | ACTCGAGTGGATGGGAAGGATTGATCCTTACGACTCCGAAACCC |
| | | ATTACAACCAGAAGTTCAAGGACCGCGTGACCATGACTGTGGAT |
| | | AAGTCCACTTCCACCGCTTACATGGAGCTGTCCAGCCTGCGCTCC |
| | | GAGGATACCGCAGTGTACTACTGCGCCCGGGGAAACTGGGACGA |
| | | CTATTGGGGACAGGGAACTACCGTGACCGTGTCAAGCACCACTA |
| | | CCCCAGCACCGAGGCCACCCACCCCGGCTCCTACCATCGCCTCCC |
| | | AGCCTCTGTCCCTGCGTCCGGAggcatgtagacccgcagctggtggggccgtgcata |
| | | cccggggtcttgacttcgcctgcgatatctacatttgggcccctctggctggtacttgcggggtcctgctgcttt |
| | | cactcgtgatcactctttactgtaagcgcggtcggaagaagctgctgtacatctttaagcaacccttcatgagg |
| | | cctgtgcagactactcaagaggaggacggctgttcatgccggttcccagaggaggaggaaggcggctgc |
| | | gaactgcgcgtgaaattcagccgcagcgcagatgctccagcctacaagcaggggcagaaccagctctac |
| | | aacgaactcaatcttggtcggagagaggagtacgacgtgctggacaagcggagaggacgggacccaga |
| | | aatgggcgggaagccgcgcagaaagaatccccaagagggcctgtacaacgagctccaaaaggataaga |
| | | tggcagaagcctatagcgagattggtatgaaaggggaacgcagaagaggcaaaggccacgacggactgt |
| | | accagggactcagcaccgccaccaaggacacctatgacgctcttcacatgcaggccctgccgcctcgg |
| hzCAR123-7 | 2470 | MALPVTALLLPLALLLHAARPDVVMTQSPAFLSVTPGEKVTITCRAS |
| AA | | KSISKDLAWYQQK |
| | | PDQAPKLLIYSGSTLQSGVPSRFSGSGSGTDFTFTISSLEAEDAATYY |
| | | CQQHNKYPYTFG |
| | | GGTKVEIKGGGGSGGGGSGGGGSGGGGSQVQLVQSGAEVKKPGAS |
| | | VKVSCKASGYTFTSY |
| | | WMNWVRQAPGQGLEWMGRIDPYDSETHYNQKFKDRVTMTVDKS |
| | | TSTAYMELSSLRSEDTA |
| | | VYYCARGNWDDYWGQGTTVTVSSTTTPAPRPPTPAPTIASQPLSLR |
| | | PEACRPAAGGAVHT |
| | | RGLDFACDIYIWAPLAGTCGVLLLSLVITLYCKRGRKKLLYIFKQPF |
| | | MRPVQTTQEEDGC |
| | | SCRFPEEEEGGCELRVKFSRSADAPAYKQGQNQLYNELNLGRREEY |
| | | DVLDKRRGRDPEMG |
| | | GKPRRKNPQEGLYNELQKDKMAEAYSEIGMKGERRRGKGHDGLY |
| | | QGLSTATKDTYDALHM |
| | | QALPPR |
| hzCAR123-7 | 2471 | MALPVTALLLPLALLLHAARPDVVMTQSPAFLSVTPGEKVTITCRAS |
| scFv | | KSISKDLAWYQQK |
| | | PDQAPKLLIYSGSTLQSGVPSRFSGSGSGTDFTFTISSLEAEDAATYY |
| | | CQQHNKYPYTFG |
| | | GGTKVEIKGGGGSGGGGSGGGGSGGGGSQVQLVQSGAEVKKPGAS |
| | | VKVSCKASGYTFTSY |
| | | WMNWVRQAPGQGLEWMGRIDPYDSETHYNQKFKDRVTMTVDKS |
| | | TSTAYMELSSLRSEDTA |
| | | VYYCARGNWDDYWGQGTTVTVSS |
| hzCAR123-7 | 2449 | QVQLVQSGAEVKKPGASVKVSCKASGYTFTSYWMNWVRQAPGQG |
| VH | | LEWMGRIDPYDSETHYNQKFKDRVTMTVDKSTSTAYMELSSLRSE |
| | | DTAVYYCARGNWDDYWGQGTTVTVSS |
| hzCAR123-7 | 2458 | DVVMTQSPAFLSVTPGEKVTITCRASKSISKDLAWYQQKPDQAPKL |
| VL | | LIYSGSTLQSGVPSRFSGSGSGTDFTFTISSLEAEDAATYYCQQHNKY |
| | | PYTFGGGTKVEIK |
| hzCAR123-8 | 2472 | ATGGCCCTCCCTGTCACCGCCCTGCTGCTTCCGCTGGCTCTTCTG |
| NT | | CTCCACGCCGCTCGGCCCGACGTGGTCATGACTCAGTCCCCGGA |
| | | CTCACTCGCGGTGTCGCTTGGAGAGAGAGCGACCATCAACTGTC |
| | | GGGCCTCAAAGAGCATCAGCAAGGACCTGGCCTGGTACCAGCAG |
| | | AAGCCGGGACAGCCGCCAAAGCTGCTGATCTACTCCGGGTCCAC |
| | | CTTGCAATCTGGTGTCCCTGACCGGTTCTCCGGTTCCGGGTCGGG |
| | | TACCGACTTCACGCTCACTATTTCGTCGCTGCAAGCCGAAGATGT |
| | | GGCCGTGTACTATTGCCAACAGCACAACAAGTACCCCTACACTTT |
| | | TGGCGGAGGCACCAAGGTGGAAATCAAGGGGGGTGGCGGTAGC |
| | | GGAGGAGGGGGCTCCGGCGGCGGCGGCTCAGGGGGCGGAGGAA |
| | | GCCAAGTGCAGCTGGTCCAGTCGGGAGCCGAAGTCAAGAAGCCC |
| | | GGCGCTAGCGTGAAAGTGTCCTGCAAAGCCTCCGGGTACACATT |
| | | CACCTCCTACTGGATGAATTGGGTCAGACAGGCGCCCGGCCAGG |
| | | GACTCGAGTGGATGGGAAGGATTGATCCTTACGACTCCGAAACC |
| | | CATTACAACCAGAAGTTCAAGGACCGCGTGACCATGACTGTGGA |
| | | TAAGTCCACTTCCACCGCTTACATGGAGCTGTCCAGCCTGCGCTC |
| | | CGAGGATACCGCAGTGTACTACTGCGCCCGGGGAAACTGGGACG |
| | | ACTATTGGGGACAGGGAACTACCGTGACCGTGTCAAGCACCACT |
| | | ACCCCAGCACCGAGGCCACCCACCCCGGCTCCTACCATCGCCTC |
| | | CCAGCCTCTGTCCCTGCGTCCGGAggcatgtagacccgcagctggtggggccgtgc |
| | | atacccggggtcttgacttcgcctgcgatatctacatttgggcccctctggctggtacttgcggggtcctgctg |
| | | ctttcactcgtgatcactctttactgtaagcgcggtcggaagaagctgctgtacatctttaagcaacccttcatg |
| | | aggcctgtgcagactactcaagaggaggacggctgttcatgccggttcccagaggaggaggaaggcggc |
| | | tgcgaactgcgcgtgaaattcagccgcagcgcagatgctccagcctacaagcaggggcagaaccagctct |
| | | acaacgaactcaatcttggtcggagagaggagtacgacgtgctggacaagcggagaggacgggaccca |
| | | gaaatgggcgggaagccgcgcagaaagaatccccaagagggcctgtacaacgagctccaaaaggataa |
| | | gatggcagaagcctatagcgagattggtatgaaaggggaacgcagaagaggcaaaggccacgacggac |
| | | tgtaccagggactcagcaccgccaccaaggacacctatgacgctcttcacatgcaggccctgccgcctcg |
| | | g |
| hzCAR123-8 | 2473 | MALPVTALLLPLALLLHAARPDVVMTQSPDSLAVSLGERATINCRA |
| AA | | SKSISKDLAWYQQK |
| | | PGQPPKLLIYSGSTLQSGVPDRFSGSGSGTDFTLTISSLQAEDVAVYY |
| | | CQQHNKYPYTFG |
| | | GGTKVEIKGGGGSGGGGSGGGGSGGGGSQVQLVQSGAEVKKPGAS |
| | | VKVSCKASGYTFTSY |
| | | WMNWVRQAPGQGLEWMGRIDPYDSETHYNQKFKDRVTMTVDKS |
| | | TSTAYMELSSLRSEDTA |
| | | VYYCARGNWDDYWGQGTTVTVSSTTTPAPRPPTPAPTIASQPLSLR |
| | | PEACRPAAGGAVHT |
| | | RGLDFACDIYIWAPLAGTCGVLLLSLVITLYCKRGRKKLLYIFKQPF |
| | | MRPVQTTQEEDGC |
| | | SCRFPEEEEGGCELRVKFSRSADAPAYKQGQNQLYNELNLGRREEY |
| | | DVLDKRRGRDPEMG |
| | | GKPRRKNPQEGLYNELQKDKMAEAYSEIGMKGERRRGKGHDGLY |
| | | QGLSTATKDTYDALHM |
| | | QALPPR |
| hzCAR123-8 | 2474 | MALPVTALLLPLALLLHAARPDVVMTQSPDSLAVSLGERATINCRA |
| scFv | | SKSISKDLAWYQQK |
| | | PGQPPKLLIYSGSTLQSGVPDRFSGSGSGTDFTLTISSLQAEDVAVYY |
| | | CQQHNKYPYTFG |
| | | GGTKVEIKGGGGSGGGGSGGGGSGGGGSQVQLVQSGAEVKKPGAS |
| | | VKVSCKASGYTFTSY |
| | | WMNWVRQAPGQGLEWMGRIDPYDSETHYNQKFKDRVTMTVDKS |
| | | TSTAYMELSSLRSEDTA |
| | | VYYCARGNWDDYWGQGTTVTVSS |
| hzCAR123-8 | 2449 | QVQLVQSGAEVKKPGASVKVSCKASGYTFTSYWMNWVRQAPGQG |
| VH | | LEWMGRIDPYDSETHYNQKFKDRVTMTVDKSTSTAYMELSSLRSE |
| | | DTAVYYCARGNWDDYWGQGTTVTVSS |
| hzCAR123-8 | 2462 | DVVMTQSPDSLAVSLGERATINCRASKSISKDLAWYQQKPGQPPKL |
| VL | | LIYSGSTLQSGVPDRFSGSGSGTDFTLTISSLQAEDVAVYYCQQHNK |
| | | YPYTFGGGTKVEIK |
| hzCAR123-9 | 2475 | ATGGCCCTCCCTGTCACCGCCCTGCTGCTTCCGCTGGCTCTTCTG |
| NT | | CTCCACGCCGCTCGGCCCCAAGTGCAGCTGGTGCAGTCAGGCAG |
| | | CGAACTGAAGAAGCCCGGAGCCTCCGTCAAAGTGTCCTGCAAAG |
| | | CCTCGGGATACACCTTCACCTCCTACTGGATGAACTGGGTCCGCC |
| | | AGGCACCTGGACAGGGGCTGGAGTGGATGGGAAGGATCGATCC |
| | | CTACGATTCCGAAACCCATTACAATCAGAAGTTCAAGGACCGGT |
| | | TTGTGTTCTCCGTGGACAAGTCCGTGTCCACCGCCTACCTCCAAA |
| | | TTAGCAGCCTGAAGGCGGAGGATACAGCTGTCTACTACTGCGCT |
| | | CGCGGAAACTGGGATGACTATTGGGGCCAGGGAACTACCGTGAC |
| | | TGTGTCCTCCGGGGGTGGCGGTAGCGGAGGAGGGGGCTCCGGCG |
| | | GCGGCGGCTCAGGGGGCGGAGGAAGCGACGTGCAGCTCACCCA |
| | | GTCGCCCTCATTTCTGTCGGCCTCAGTGGGAGACAGAGTGACCAT |
| | | TACTTGTCGGGCCTCCAAGAGCATCTCCAAGGACCTGGCCTGGT |
| | | ATCAGCAGAAGCCAGGAAAGGCGCCTAAGTTGCTCATCTACTCG |
| | | GGGTCGACCCTGCAATCTGGCGTGCCGTCCCGGTTCTCCGGTTCG |
| | | GGAAGCGGTACCGAATTCACCCTTACTATCTCCTCCCTGCAACCG |
| | | GAGGACTTCGCCACCTACTACTGCCAACAGCACAACAAGTACCC |
| | | GTACACTTTCGGGGGTGGCACGAAGGTCGAAATCAAGACCACTA |
| | | CCCCAGCACCGAGGCCACCCACCCCGGCTCCTACCATCGCCTCCC |
| | | AGCCTCTGTCCCTGCGTCCGGAggcatgtagacccgcagctggtggggccgtgcata |
| | | cccggggtcttgacttcgcctgcgatatctacatttgggcccctctggctggtacttgcggggtcctgctgcttt |
| | | cactcgtgatcactctttactgtaagcgcggtcggaagaagctgctgtacatctttaagcaacccttcatgagg |
| | | cctgtgcagactactcaagaggaggacggctgttcatgccggttcccagaggaggaggaaggcggctgc |
| | | gaactgcgcgtgaaattcagccgcagcgcagatgctccagcctacaagcaggggcagaaccagctctac |
| | | aacgaactcaatcttggtcggagagaggagtacgacgtgctggacaagcggagaggacgggacccaga |
| | | aatgggcgggaagccgcgcagaaagaatccccaagagggcctgtacaacgagctccaaaaggataaga |
| | | tggcagaagcctatagcgagattggtatgaaaggggaacgcagaagaggcaaaggccacgacggactgt |
| | | accagggactcagcaccgccaccaaggacacctatgacgctcttcacatgcaggccctgccgcctcgg |
| hzCAR123-9 | 2476 | MALPVTALLLPLALLLHAARPQVQLVQSGSELKKPGASVKVSCKAS |
| AA | | GYTFTSYWMNWVRQ |
| | | APGQGLEWMGRIDPYDSETHYNQKFKDRFVFSVDKSVSTAYLQISS |
| | | LKAEDTAVYYCARG |
| | | NWDDYWGQGTTVTVSSGGGGSGGGGSGGGGSGGGGSDVQLTQSP |
| | | SFLSASVGDRVTITCR |
| | | ASKSISKDLAWYQQKPGKAPKLLIYSGSTLQSGVPSRFSGSGSGTEF |
| | | TLTISSLQPEDFA |
| | | TYYCQQHNKYPYTFGGGTKVEIKTTTPAPRPPTPAPTIASQPLSLRPE |
| | | ACRPAAGGAVHT |
| | | RGLDFACDIYIWAPLAGTCGVLLLSLVITLYCKRGRKKLLYIFKQPF |
| | | MRPVQTTQEEDGC |
| | | SCRFPEEEEGGCELRVKFSRSADAPAYKQGQNQLYNELNLGRREEY |
| | | DVLDKRRGRDPEMG |
| | | GKPRRKNPQEGLYNELQKDKMAEAYSEIGMKGERRRGKGHDGLY |
| | | QGLSTATKDTYDALHM |
| | | QALPPR |
| hzCAR123-9 | 2477 | MALPVTALLLPLALLLHAARPQVQLVQSGSELKKPGASVKVSCKAS |
| scFv | | GYTFTSYWMNWVRQ |
| | | APGQGLEWMGRIDPYDSETHYNQKFKDRFVFSVDKSVSTAYLQISS |
| | | LKAEDTAVYYCARG |
| | | NWDDYWGQGTTVTVSSGGGGSGGGGSGGGGSGGGGSDVQLTQSP |
| | | SFLSASVGDRVTITCR |
| | | ASKSISKDLAWYQQKPGKAPKLLIYSGSTLQSGVPSRFSGSGSGTEF |
| | | TLTISSLQPEDFA |
| | | TYYCQQHNKYPYTFGGGTKVEIK |
| hzCAR123-9 | 2478 | QVQLVQSGSELKKPGASVKVSCKASGYTFTSYWMNWVRQAPGQG |
| VH | | LEWMGRIDPYDSETHYNQKFKDRFVFSVDKSVSTAYLQISSLKAED |
| | | TAVYYCARGNWDDYWGQGTTVTVSS |
| hzCAR123-10 | 2450 | DVQLTQSPSFLSASVGDRVTITCRASKSISKDLAWYQQKPGKAPKLL |
| VL | | IYSGSTLQSGVPSRFSGSGSGTEFTLTISSLQPEDFATYYCQQHNKYP |
| | | YTFGGGTKVEIK |
| hzCAR123-10 | 2479 | ATGGCCCTCCCTGTCACCGCCCTGCTGCTTCCGCTGGCTCTTCTG |
| NT | | CTCCACGCCGCTCGGCCCCAAGTGCAGCTGGTGCAGTCAGGCAG |
| | | CGAACTGAAGAAGCCCGGAGCCTCCGTCAAAGTGTCCTGCAAAG |
| | | CCTCGGGATACACCTTCACCTCCTACTGGATGAACTGGGTCCGCC |
| | | AGGCACCTGGACAGGGGCTGGAGTGGATGGGAAGGATCGATCC |
| | | CTACGATTCCGAAACCCATTACAATCAGAAGTTCAAGGACCGGT |
| | | TTGTGTTCTCCGTGGACAAGTCCGTGTCCACCGCCTACCTCCAAA |
| | | TTAGCAGCCTGAAGGCGGAGGATACAGCTGTCTACTACTGCGCT |
| | | CGCGGAAACTGGGATGACTATTGGGGCCAGGGAACTACCGTGAC |
| | | TGTGTCCTCCGGGGGTGGCGGTAGCGGAGGAGGGGGCTCCGGCG |
| | | GCGGCGGCTCAGGGGGCGGAGGAAGCGAAGTGGTGCTGACCCA |
| | | GTCGCCCGCAACCCTCTCTCTGTCGCCGGGAGAACGCGCCACTCT |
| | | TTCCTGTCGGGCGTCCAAGAGCATCTCAAAGGACCTCGCCTGGT |
| | | ACCAGCAGAAGCCTGGTCAAGCCCCGCGGCTGCTGATCTACTCC |
| | | GGCTCCACGCTGCAATCAGGAATCCCAGCCAGATTTTCCGGTTCG |
| | | GGGTCGGGGACTGACTTCACCTTGACCATTAGCTCGCTGGAACCT |
| | | GAGGACTTCGCCGTGTATTACTGCCAGCAGCACAACAAGTACCC |
| | | GTACACCTTCGGAGGCGGTACTAAGGTCGAGATCAAGACCACTA |
| | | CCCCAGCACCGAGGCCACCCACCCCGGCTCCTACCATCGCCTCCC |
| | | AGCCTCTGTCCCTGCGTCCGGAggcatgtagacccgcagctggtggggccgtgcata |
| | | cccggggtcttgacttcgcctgcgatatctacatttgggcccctctggctggtacttgcggggtcctgctgcttt |
| | | cactcgtgatcactctttactgtaagcgcggtcggaagaagctgctgtacatctttaagcaacccttcatgagg |
| | | cctgtgcagactactcaagaggaggacggctgttcatgccggttcccagaggaggaggaaggcggctgc |
| | | gaactgcgcgtgaaattcagccgcagcgcagatgctccagcctacaagcaggggcagaaccagctctac |
| | | aacgaactcaatcttggtcggagagaggagtacgacgtgctggacaagcggagaggacgggacccaga |
| | | aatgggcgggaagccgcgcagaaagaatccccaagagggcctgtacaacgagctccaaaaggataaga |
| | | tggcagaagcctatagcgagattggtatgaaaggggaacgcagaagaggcaaaggccacgacggactgt |
| | | accagggactcagcaccgccaccaaggacacctatgacgctcttcacatgcaggccctgccgcctcgg |
| hzCAR123-10 | 2480 | MALPVTALLLPLALLLHAARPQVQLVQSGSELKKPGASVKVSCKAS |
| AA | | GYTFTSYWMNWVRQ |
| | | APGQGLEWMGRIDPYDSETHYNQKFKDRFVFSVDKSVSTAYLQISS |
| | | LKAEDTAVYYCARG |
| | | NWDDYWGQGTTVTVSSGGGGSGGGGSGGGGSGGGGSEVVLTQSP |
| | | ATLSLSPGERATLSCR |
| | | ASKSISKDLAWYQQKPGQAPRLLIYSGSTLQSGIPARFSGSGSGTDFT |
| | | LTISSLEPEDFA |
| | | VYYCQQHNKYPYTFGGGTKVEIKTTTPAPRPPTPAPTIASQPLSLRPE |
| | | ACRPAAGGAVHT |
| | | RGLDFACDIYIWAPLAGTCGVLLLSLVITLYCKRGRKKLLYIFKQPF |
| | | MRPVQTTQEEDGC |
| | | SCRFPEEEEGGCELRVKFSRSADAPAYKQGQNQLYNELNLGRREEY |
| | | DVLDKRRGRDPEMG |
| | | GKPRRKNPQEGLYNELQKDKMAEAYSEIGMKGERRRGKGHDGLY |
| | | QGLSTATKDTYDALHM |
| | | QALPPR |
| hzCAR123-10 | 2481 | MALPVTALLLPLALLLHAARPQVQLVQSGSELKKPGASVKVSCKAS |
| scFv | | GYTFTSYWMNWVRQ |
| | | APGQGLEWMGRIDPYDSETHYNQKFKDRFVFSVDKSVSTAYLQISS |
| | | LKAEDTAVYYCARG |
| | | NWDDYWGQGTTVTVSSGGGGSGGGGSGGGGSGGGGSEVVLTQSP |
| | | ATLSLSPGERATLSCR |
| | | ASKSISKDLAWYQQKPGQAPRLLIYSGSTLQSGIPARFSGSGSGTDFT |
| | | LTISSLEPEDFA |
| | | VYYCQQHNKYPYTFGGGTKVEIK |
| hzCAR123-10 | 2478 | QVQLVQSGSELKKPGASVKVSCKASGYTFTSYWMNWVRQAPGQG |
| VH | | LEWMGRIDPYDSETHYNQKFKDRFVFSVDKSVSTAYLQISSLKAED |
| | | TAVYYCARGNWDDYWGQGTTVTVSS |
| hzCAR123-10 | 2454 | EVVLTQSPATLSLSPGERATLSCRASKSISKDLAWYQQKPGQAPRLL |
| VL | | IYSGSTLQSGIPARFSGSGSGTDFTLTISSLEPEDFAVYYCQQHNKYP |
| | | YTFGGGTKVEIK |
| hzCAR123-11 | 2482 | ATGGCCCTCCCTGTCACCGCCCTGCTGCTTCCGCTGGCTCTTCTG |
| NT | | CTCCACGCCGCTCGGCCCCAAGTGCAGCTGGTGCAGTCAGGCAG |
| | | CGAACTGAAGAAGCCCGGAGCCTCCGTCAAAGTGTCCTGCAAAG |
| | | CCTCGGGATACACCTTCACCTCCTACTGGATGAACTGGGTCCGCC |
| | | AGGCACCTGGACAGGGGCTGGAGTGGATGGGAAGGATCGATCC |
| | | CTACGATTCCGAAACCCATTACAATCAGAAGTTCAAGGACCGGT |
| | | TTGTGTTCTCCGTGGACAAGTCCGTGTCCACCGCCTACCTCCAAA |
| | | TTAGCAGCCTGAAGGCGGAGGATACAGCTGTCTACTACTGCGCT |
| | | CGCGGAAACTGGGATGACTATTGGGGCCAGGGAACTACCGTGAC |
| | | TGTGTCCTCCGGGGGTGGCGGTAGCGGAGGAGGGGGCTCCGGCG |
| | | GCGGCGGCTCAGGGGGCGGAGGAAGCGACGTCGTGATGACCCA |
| | | GTCACCGGCATTCCTGTCCGTGACTCCCGGAGAAAAGGTCACGA |
| | | TTACTTGCCGGGCGTCCAAGAGCATCTCCAAGGACCTCGCCTGGT |
| | | ACCAACAGAAGCCGGACCAGGCCCCTAAGCTGTTGATCTACTCG |
| | | GGGTCCACCCTTCAATCGGGAGTGCCATCGCGGTTTAGCGGTTCG |
| | | GGTTCTGGGACCGACTTCACTTTCACCATCTCCTCACTGGAAGCC |
| | | GAGGATGCCGCCACTTACTACTGTCAGCAGCACAACAAGTATCC |
| | | GTACACCTTCGGAGGCGGTACCAAAGTGGAGATCAAGACCACTA |
| | | CCCCAGCACCGAGGCCACCCACCCCGGCTCCTACCATCGCCTCCC |
| | | AGCCTCTGTCCCTGCGTCCGGAggcatgtagacccgcagctggtggggccgtgcata |
| | | cccggggtcttgacttcgcctgcgatatctacatttgggcccctctggctggtacttgcggggtcctgctgcttt |
| | | cactcgtgatcactctttactgtaagcgcggtcggaagaagctgctgtacatctttaagcaacccttcatgagg |
| | | cctgtgcagactactcaagaggaggacggctgttcatgccggttcccagaggaggaggaaggcggctgc |
| | | gaactgcgcgtgaaattcagccgcagcgcagatgctccagcctacaagcaggggcagaaccagctctac |
| | | aacgaactcaatcttggtcggagagaggagtacgacgtgctggacaagcggagaggacgggacccaga |
| | | aatgggcgggaagccgcgcagaaagaatccccaagagggcctgtacaacgagctccaaaaggataaga |
| | | tggcagaagcctatagcgagattggtatgaaaggggaacgcagaagaggcaaaggccacgacggactgt |
| | | accagggactcagcaccgccaccaaggacacctatgacgctcttcacatgcaggccctgccgcctcgg |
| hzCAR123-11 | 2483 | MALPVTALLLPLALLLHAARPQVQLVQSGSELKKPGASVKVSCKAS |
| AA | | GYTFTSYWMNWVRQ |
| | | APGQGLEWMGR1DPYDSETHYNQKFKDRFVFSVDKSVSTAYLQISS |
| | | LKAEDTAVYYCARG |
| | | NWDDYWGQGTTVTVSSGGGGSGGGGSGGGGSGGGGSDVVMTQS |
| | | PAFLSVTPGEKVTITCR |
| | | ASKSISKDLAWYQQKPDQAPKLLIYSGSTLQSGVPSRFSGSGSGTDF |
| | | TFTISSLEAEDAA |
| | | TYYCQQHNKYPYTFGGGTKVEIKTTTPAPRPPTPAPTIASQPLSLRPE |
| | | ACRPAAGGAVHT |
| | | RGLDFACDIYIWAPLAGTCGVLLLSLVITLYCKRGRKKLLYIFKQPF |
| | | MRPVQTTQEEDGC |
| | | SCRFPEEEEGGCELRVKFSRSADAPAYKQGQNQLYNELNLGRREEY |
| | | DVLDKRRGRDPEMG |
| | | GKPRRKNPQEGLYNELQKDKMAEAYSEIGMKGERRRGKGHDGLY |
| | | QGLSTATKDTYDALHM |
| | | QALPPR |
| hzCAR123-11 | 2484 | MALPVTALLLPLALLLHAARPQVQLVQSGSELKKPGASVKVSCKAS |
| scFv | | GYTFTSYWMNWVRQ |
| | | APGQGLEWMGRIDPYDSETHYNQKFKDRFVFSVDKSVSTAYLQISS |
| | | LKAEDTAVYYCARG |
| | | NWDDYWGQGTTVTVSSGGGGSGGGGSGGGGSGGGGSDVVMTQS |
| | | PAFLSVTPGEKVTITCR |
| | | ASKSISKDLAWYQQKPDQAPKLLIYSGSTLQSGVPSRFSGSGSGTDF |
| | | TFTISSLEAEDAA |
| | | TYYCQQHNKYPYTFGGGTKVEIK |
| hzCAR123-11 | 2478 | QVQLVQSGSELKKPGASVKVSCKASGYTFTSYWMNWVRQAPGQG |
| VH | | LEWMGRIDPYDSETHYNQKFKDRFVFSVDKSVSTAYLQISSLKAED |
| | | TAVYYCARGNWDDYWGQGTTVTVSS |
| hzCAR123-11 | 2458 | DVVMTQSPAFLSVTPGEKVTITCRASKSISKDLAWYQQKPDQAPKL |
| VL | | LIYSGSTLQSGVPSRFSGSGSGTDFTFTISSLEAEDAATYYCQQHNKY |
| | | PYTFGGGTKVEIK |
| hzCAR123-12 | 2485 | ATGGCCCTCCCTGTCACCGCCCTGCTGCTTCCGCTGGCTCTTCTG |
| NT | | CTCCACGCCGCTCGGCCCCAAGTGCAGCTGGTGCAGTCAGGCAG |
| | | CGAACTGAAGAAGCCCGGAGCCTCCGTCAAAGTGTCCTGCAAAG |
| | | CCTCGGGATACACCTTCACCTCCTACTGGATGAACTGGGTCCGCC |
| | | AGGCACCTGGACAGGGGCTGGAGTGGATGGGAAGGATCGATCC |
| | | CTACGATTCCGAAACCCATTACAATCAGAAGTTCAAGGACCGGT |
| | | TTGTGTTCTCCGTGGACAAGTCCGTGTCCACCGCCTACCTCCAAA |
| | | TTAGCAGCCTGAAGGCGGAGGATACAGCTGTCTACTACTGCGCT |
| | | CGCGGAAACTGGGATGACTATTGGGGCCAGGGAACTACCGTGAC |
| | | TGTGTCCTCCGGGGGTGGCGGTAGCGGAGGAGGGGGCTCCGGCG |
| | | GCGGCGGCTCAGGGGGCGGAGGAAGCGACGTGGTCATGACTCA |
| | | GTCCCCGGACTCACTCGCGGTGTCGCTTGGAGAGAGAGCGACCA |
| | | TCAACTGTCGGGCCTCAAAGAGCATCAGCAAGGACCTGGCCTGG |
| | | TACCAGCAGAAGCCGGGACAGCCGCCAAAGCTGCTGATCTACTC |
| | | CGGGTCCACCTTGCAATCTGGTGTCCCTGACCGGTTCTCCGGTTC |
| | | CGGGTCGGGTACCGACTTCACGCTCACTATTTCGTCGCTGCAAGC |
| | | CGAAGATGTGGCCGTGTACTATTGCCAACAGCACAACAAGTACC |
| | | CCTACACTTTTGGCGGAGGCACCAAGGTGGAAATCAAGACCACT |
| | | ACCCCAGCACCGAGGCCACCCACCCCGGCTCCTACCATCGCCTC |
| | | CCAGCCTCTGTCCCTGCGTCCGGAggcatgtagacccgcagctggtggggccgtgc |
| | | atacccggggtcttgacttcgcctgcgatatctacatttgggcccctctggctggtacttgcggggtcctgctg |
| | | ctttcactcgtgatcactctttactgtaagcgcggtcggaagaagctgctgtacatctttaagcaacccttcatg |
| | | aggcctgtgcagactactcaagaggaggacggctgttcatgccggttcccagaggaggaggaaggcggc |
| | | tgcgaactgcgcgtgaaattcagccgcagcgcagatgctccagcctacaagcaggggcagaaccagctct |
| | | acaacgaactcaatcttggtcggagagaggagtacgacgtgctggacaagcggagaggacgggaccca |
| | | gaaatgggcgggaagccgcgcagaaagaatccccaagagggcctgtacaacgagctccaaaaggataa |
| | | gatggcagaagcctatagcgagattggtatgaaaggggaacgcagaagaggcaaaggccacgacggac |
| | | tgtaccagggactcagcaccgccaccaaggacacctatgacgctcttcacatgcaggccctgccgcctcg |
| | | g |
| hzCAR123-12 | 2486 | MALPVTALLLPLALLLHAARPQVQLVQSGSELKKPGASVKVSCKAS |
| AA | | GYTFTSYWMNWVRQ |
| | | APGQGLEWMGRIDPYDSETHYNQKFKDRFVFSVDKSVSTAYLQISS |
| | | LKAEDTAVYYCARG |
| | | NWDDYWGQGTTVTVSSGGGGSGGGGSGGGGSGGGGSDVVMTQS |
| | | PDSLAVSLGERATINCR |
| | | ASKSISKDLAWYQQKPGQPPKLLIYSGSTLQSGVPDRFSGSGSGTDF |
| | | TLTISSLQAEDVA |
| | | VYYCQQHNKYPYTFGGGTKVEIKTTTPAPRPPTPAPTIASQPLSLRPE |
| | | ACRPAAGGAVHT |
| | | RGLDFACDIYIWAPLAGTCGVLLLSLVITLYCKRGRKKLLYIFKQPF |
| | | MRPVQTTQEEDGC |
| | | SCRFPEEEEGGCELRVKFSRSADAPAYKQGQNQLYNELNLGRREEY |
| | | DVLDKRRGRDPEMG |
| | | GKPRRKNPQEGLYNELQKDKMAEAYSEIGMKGERRRGKGHDGLY |
| | | QGLSTATKDTYDALHM |
| | | QALPPR |
| hzCAR123-12 | 2487 | MALPVTALLLPLALLLHAARPQVQLVQSGSELKKPGASVKVSCKAS |
| scFv | | GYTFTSYWMNWVRQ |
| | | APGQGLEWMGRIDPYDSETHYNQKFKDRFVFSVDKSVSTAYLQISS |
| | | LKAEDTAVYYCARG |
| | | NWDDYWGQGTTVTVSSGGGGSGGGGSGGGGSGGGGSDVVMTQS |
| | | PDSLAVSLGERATINCR |
| | | ASKSISKDLAWYQQKPGQPPKLLIYSGSTLQSGVPDRFSGSGSGTDF |
| | | TLTISSLQAEDVA |
| | | VYYCQQHNKYPYTFGGGTKVEIK |
| hzCAR123-12 | 2478 | QVQLVQSGSELKKPGASVKVSCKASGYTFTSYWMNWVRQAPGQG |
| VH | | LEWMGRIDPYDSETHYNQKFKDRFVFSVDKSVSTAYLQISSLKAED |
| | | TAVYYCARGNWDDYWGQGTTVTVSS |
| hzCAR123-12 | 2462 | DVVMTQSPDSLAVSLGERATINCRASKSISKDLAWYQQKPGQPPKL |
| VL | | LIYSGSTLQSGVPDRFSGSGSGTDFTLTISSLQAEDVAVYYCQQHNK |
| | | YPYTFGGGTKVEIK |
| hzCAR123-13 | 2488 | ATGGCCCTCCCTGTCACCGCCCTGCTGCTTCCGCTGGCTCTTCTG |
| NT | | CTCCACGCCGCTCGGCCCGACGTGCAGCTCACCCAGTCGCCCTCA |
| | | TTTCTGTCGGCCTCAGTGGGAGACAGAGTGACCATTACTTGTCGG |
| | | GCCTCCAAGAGCATCTCCAAGGACCTGGCCTGGTATCAGCAGAA |
| | | GCCAGGAAAGGCGCCTAAGTTGCTCATCTACTCGGGGTCGACCC |
| | | TGCAATCTGGCGTGCCGTCCCGGTTCTCCGGTTCGGGAAGCGGTA |
| | | CCGAATTCACCCTTACTATCTCCTCCCTGCAACCGGAGGACTTCG |
| | | CCACCTACTACTGCCAACAGCACAACAAGTACCCGTACACTTTC |
| | | GGGGGTGGCACGAAGGTCGAAATCAAGGGGGGTGGCGGTAGCG |
| | | GAGGAGGGGGCTCCGGCGGCGGCGGCTCAGGGGGCGGAGGAAG |
| | | CCAAGTGCAGCTGGTGCAGTCAGGCAGCGAACTGAAGAAGCCCG |
| | | GAGCCTCCGTCAAAGTGTCCTGCAAAGCCTCGGGATACACCTTC |
| | | ACCTCCTACTGGATGAACTGGGTCCGCCAGGCACCTGGACAGGG |
| | | GCTGGAGTGGATGGGAAGGATCGATCCCTACGATTCCGAAACCC |
| | | ATTACAATCAGAAGTTCAAGGACCGGTTTGTGTTCTCCGTGGACA |
| | | AGTCCGTGTCCACCGCCTACCTCCAAATTAGCAGCCTGAAGGCG |
| | | GAGGATACAGCTGTCTACTACTGCGCTCGCGGAAACTGGGATGA |
| | | CTATTGGGGCCAGGGAACTACCGTGACTGTGTCCTCCACCACTAC |
| | | CCCAGCACCGAGGCCACCCACCCCGGCTCCTACCATCGCCTCCC |
| | | AGCCTCTGTCCCTGCGTCCGGAggcatgtagacccgcagctggtggggccgtgcata |
| | | cccggggtcttgacttcgcctgcgatatctacatttgggcccctctggctggtacttgcggggtcctgctgcttt |
| | | cactcgtgatcactctttactgtaagcgcggtcggaagaagctgctgtacatctttaagcaacccttcatgagg |
| | | cctgtgcagactactcaagaggaggacggctgttcatgccggttcccagaggaggaggaaggcggctgc |
| | | gaactgcgcgtgaaattcagccgcagcgcagatgctccagcctacaagcaggggcagaaccagctctac |
| | | aacgaactcaatcttggtcggagagaggagtacgacgtgctggacaagcggagaggacgggacccaga |
| | | aatgggcgggaagccgcgcagaaagaatccccaagagggcctgtacaacgagctccaaaaggataaga |
| | | tggcagaagcctatagcgagattggtatgaaaggggaacgcagaagaggcaaaggccacgacggactgt |
| | | accagggactcagcaccgccaccaaggacacctatgacgctcttcacatgcaggccctgccgcctcgg |
| hzCAR123-13 | 2489 | MALPVTALLLPLALLLHAARPDVQLTQSPSFLSASVGDRVTITCRAS |
| AA | | KSISKDLAWYQQK |
| | | PGKAPKLLIYSGSTLQSGVPSRFSGSGSGTEFTLTISSLQPEDFATYYC |
| | | QQHNKYPYTFG |
| | | GGTKVEIKGGGGSGGGGSGGGGSGGGGSQVQLVQSGSELKKPGAS |
| | | VKVSCKASGYTFTSY |
| | | WMNWVRQAPGQGLEWMGRIDPYDSETHYNQKFKDRFVFSVDKSV |
| | | STAYLQISSLKAEDTA |
| | | VYYCARGNWDDYWGQGTTVTVSSTTTPAPRPPTPAPTIASQPLSLR |
| | | PEACRPAAGGAVHT |
| | | RGLDFACDIYIWAPLAGTCGVLLLSLVITLYCKRGRKKLLYIFKQPF |
| | | MRPVQTTQEEDGC |
| | | SCRFPEEEEGGCELRVKFSRSADAPAYKQGQNQLYNELNLGRREEY |
| | | DVLDKRRGRDPEMG |
| | | GKPRRKNPQEGLYNELQKDKMAEAYSEIGMKGERRRGKGHDGLY |
| | | QGLSTATKDTYDALHM |
| | | QALPPR |
| hzCAR123-13 | 2490 | MALPVTALLLPLALLLHAARPDVQLTQSPSFLSASVGDRVTITCRAS |
| scFv | | KSISKDLAWYQQK |
| | | PGKAPKLLIYSGSTLQSGVPSRFSGSGSGTEFTLTISSLQPEDFATYYC |
| | | QQHNKYPYTFG |
| | | GGTKVEIKGGGGSGGGGSGGGGSGGGGSQVQLVQSGSELKKPGAS |
| | | VKVSCKASGYTFTSY |
| | | WMNWVRQAPGQGLEWMGRIDPYDSETHYNQKFKDRFVFSVDKSV |
| | | STAYLQISSLKAEDTA |
| | | VYYCARGNWDDYWGQGTTVTVSS |
| hzCAR123-13 | 2478 | QVQLVQSGSELKKPGASVKVSCKASGYTFTSYWMNWVRQAPGQG |
| VH | | LEWMGRIDPYDSETHYNQKFKDRFVFSVDKSVSTAYLQISSLKAED |
| | | TAVYYCARGNWDDYWGQGTTVTVSS |
| hzCAR123-13 | 2450 | DVQLTQSPSFLSASVGDRVTITCRASKSISKDLAWYQQKPGKAPKLL |
| VL | | IYSGSTLQSGVPSRFSGSGSGTEFTLTISSLQPEDFATYYCQQHNKYP |
| | | YTFGGGTKVEIK |
| hzCAR123-14 | 2491 | ATGGCCCTCCCTGTCACCGCCCTGCTGCTTCCGCTGGCTCTTCTG |
| NT | | CTCCACGCCGCTCGGCCCGAAGTGGTGCTGACCCAGTCGCCCGC |
| | | AACCCTCTCTCTGTCGCCGGGAGAACGCGCCACTCTTTCCTGTCG |
| | | GGCGTCCAAGAGCATCTCAAAGGACCTCGCCTGGTACCAGCAGA |
| | | AGCCTGGTCAAGCCCCGCGGCTGCTGATCTACTCCGGCTCCACGC |
| | | TGCAATCAGGAATCCCAGCCAGATTTTCCGGTTCGGGGTCGGGG |
| | | ACTGACTTCACCTTGACCATTAGCTCGCTGGAACCTGAGGACTTC |
| | | GCCGTGTATTACTGCCAGCAGCACAACAAGTACCCGTACACCTT |
| | | CGGAGGCGGTACTAAGGTCGAGATCAAGGGGGGTGGCGGTAGC |
| | | GGAGGAGGGGGCTCCGGCGGCGGCGGCTCAGGGGGCGGAGGAA |
| | | GCCAAGTGCAGCTGGTGCAGTCAGGCAGCGAACTGAAGAAGCCC |
| | | GGAGCCTCCGTCAAAGTGTCCTGCAAAGCCTCGGGATACACCTT |
| | | CACCTCCTACTGGATGAACTGGGTCCGCCAGGCACCTGGACAGG |
| | | GGCTGGAGTGGATGGGAAGGATCGATCCCTACGATTCCGAAACC |
| | | CATTACAATCAGAAGTTCAAGGACCGGTTTGTGTTCTCCGTGGAC |
| | | AAGTCCGTGTCCACCGCCTACCTCCAAATTAGCAGCCTGAAGGC |
| | | GGAGGATACAGCTGTCTACTACTGCGCTCGCGGAAACTGGGATG |
| | | ACTATTGGGGCCAGGGAACTACCGTGACTGTGTCCTCCACCACT |
| | | ACCCCAGCACCGAGGCCACCCACCCCGGCTCCTACCATCGCCTC |
| | | CCAGCCTCTGTCCCTGCGTCCGGAggcatgtagacccgcagctggtggggccgtgc |
| | | atacccggggtcttgacttcgcctgcgatatctacatttgggcccctctggctggtacttgcggggtcctgctg |
| | | ctttcactcgtgatcactctttactgtaagcgcggtcggaagaagctgctgtacatctttaagcaacccttcatg |
| | | aggcctgtgcagactactcaagaggaggacggctgttcatgccggttcccagaggaggaggaaggcggc |
| | | tgcgaactgcgcgtgaaattcagccgcagcgcagatgctccagcctacaagcaggggcagaaccagctct |
| | | acaacgaactcaatcttggtcggagagaggagtacgacgtgctggacaagcggagaggacgggaccca |
| | | gaaatgggcgggaagccgcgcagaaagaatccccaagagggcctgtacaacgagctccaaaaggataa |
| | | gatggcagaagcctatagcgagattggtatgaaaggggaacgcagaagaggcaaaggccacgacggac |
| | | tgtaccagggactcagcaccgccaccaaggacacctatgacgctcttcacatgcaggccctgccgcctcg |
| | | g |
| hzCAR123-14 | 2492 | MALPVTALLLPLALLLHAARPEVVLTQSPATLSLSPGERATLSCRAS |
| AA | | KSISKDLAWYQQK |
| | | PGQAPRLLIYSGSTLQSGIPARFSGSGSGTDFTLTISSLEPEDFAVYYC |
| | | QQHNKYPYTFG |
| | | GGTKVEIKGGGGSGGGGSGGGGSGGGGSQVQLVQSGSELKKPGAS |
| | | VKVSCKASGYTFTSY |
| | | WMNWVRQAPGQGLEWMGRIDPYDSETHYNQKFKDRFVFSVDKSV |
| | | STAYLQISSLKAEDTA |
| | | VYYCARGNWDDYWGQGTTVTVSSTTTPAPRPPTPAPTIASQPLSLR |
| | | PEACRPAAGGAVHT |
| | | RGLDFACDIYIWAPLAGTCGVLLLSLVITLYCKRGRKKLLYIFKQPF |
| | | MRPVQTTQEEDGC |
| | | SCRFPEEEEGGCELRVKFSRSADAPAYKQGQNQLYNELNLGRREEY |
| | | DVLDKRRGRDPEMG |
| | | GKPRRKNPQEGLYNELQKDKMAEAYSEIGMKGERRRGKGHDGLY |
| | | QGLSTATKDTYDALHM |
| | | QALPPR |
| hzCAR123-14 | 2493 | MALPVTALLLPLALLLHAARPEVVLTQSPATLSLSPGERATLSCRAS |
| scFv | | KSISKDLAWYQQK |
| | | PGQAPRLLIYSGSTLQSGIPARFSGSGSGTDFTLTISSLEPEDFAVYYC |
| | | QQHNKYPYTFG |
| | | GGTKVEIKGGGGSGGGGSGGGGSGGGGSQVQLVQSGSELKKPGAS |
| | | VKVSCKASGYTFTSY |
| | | WMNWVRQAPGQGLEWMGRIDPYDSETHYNQKFKDRFVFSVDKSV |
| | | STAYLQISSLKAEDTA |
| | | VYYCARGNWDDYWGQGTTVTVSS |
| hzCAR123-14 | 2478 | QVQLVQSGSELKKPGASVKVSCKASGYTFTSYWMNWVRQAPGQG |
| VH | | LEWMGRIDPYDSETHYNQKFKDRFVFSVDKSVSTAYLQISSLKAED |
| | | TAVYYCARGNWDDYWGQGTTVTVSS |
| hzCAR123-14 | 2454 | EVVLTQSPATLSLSPGERATLSCRASKSISKDLAWYQQKPGQAPRLL |
| VL | | IYSGSTLQSGIPARFSGSGSGTDFTLTISSLEPEDFAVYYCQQHNKYP |
| | | YTFGGGTKVEIK |
| hzCAR123-15 | 2494 | ATGGCCCTCCCTGTCACCGCCCTGCTGCTTCCGCTGGCTCTTCTG |
| NT | | CTCCACGCCGCTCGGCCCGACGTCGTGATGACCCAGTCACCGGC |
| | | ATTCCTGTCCGTGACTCCCGGAGAAAAGGTCACGATTACTTGCCG |
| | | GGCGTCCAAGAGCATCTCCAAGGACCTCGCCTGGTACCAACAGA |
| | | AGCCGGACCAGGCCCCTAAGCTGTTGATCTACTCGGGGTCCACC |
| | | CTTCAATCGGGAGTGCCATCGCGGTTTAGCGGTTCGGGTTCTGGG |
| | | ACCGACTTCACTTTCACCATCTCCTCACTGGAAGCCGAGGATGCC |
| | | GCCACTTACTACTGTCAGCAGCACAACAAGTATCCGTACACCTTC |
| | | GGAGGCGGTACCAAAGTGGAGATCAAGGGGGGTGGCGGTAGCG |
| | | GAGGAGGGGGCTCCGGCGGCGGCGGCTCAGGGGGCGGAGGAAG |
| | | CCAAGTGCAGCTGGTGCAGTCAGGCAGCGAACTGAAGAAGCCCG |
| | | GAGCCTCCGTCAAAGTGTCCTGCAAAGCCTCGGGATACACCTTC |
| | | ACCTCCTACTGGATGAACTGGGTCCGCCAGGCACCTGGACAGGG |
| | | GCTGGAGTGGATGGGAAGGATCGATCCCTACGATTCCGAAACCC |
| | | ATTACAATCAGAAGTTCAAGGACCGGTTTGTGTTCTCCGTGGACA |
| | | AGTCCGTGTCCACCGCCTACCTCCAAATTAGCAGCCTGAAGGCG |
| | | GAGGATACAGCTGTCTACTACTGCGCTCGCGGAAACTGGGATGA |
| | | CTATTGGGGCCAGGGAACTACCGTGACTGTGTCCTCCACCACTAC |
| | | CCCAGCACCGAGGCCACCCACCCCGGCTCCTACCATCGCCTCCC |
| | | AGCCTCTGTCCCTGCGTCCGGAggcatgtagacccgcagctggtggggccgtgcata |
| | | cccggggtcttgacttcgcctgcgatatctacatttgggcccctctggctggtacttgcggggtcctgctgcttt |
| | | cactcgtgatcactctttactgtaagcgcggtcggaagaagctgctgtacatctttaagcaacccttcatgagg |
| | | cctgtgcagactactcaagaggaggacggctgttcatgccggttcccagaggaggaggaaggcggctgc |
| | | gaactgcgcgtgaaattcagccgcagcgcagatgctccagcctacaagcaggggcagaaccagctctac |
| | | aacgaactcaatcttggtcggagagaggagtacgacgtgctggacaagcggagaggacgggacccaga |
| | | aatgggcgggaagccgcgcagaaagaatccccaagagggcctgtacaacgagctccaaaaggataaga |
| | | tggcagaagcctatagcgagattggtatgaaaggggaacgcagaagaggcaaaggccacgacggactgt |
| | | accagggactcagcaccgccaccaaggacacctatgacgctcttcacatgcaggccctgccgcctcgg |
| hzCAR123-15 | 2495 | MALPVTALLLPLALLLHAARPDVVMTQSPAFLSVTPGEKVTITCRAS |
| AA | | KSISKDLAWYQQK |
| | | PDQAPKLLIYSGSTLQSGVPSRFSGSGSGTDFTFTISSLEAEDAATYY |
| | | CQQHNKYPYTFG |
| | | GGTKVEIKGGGGSGGGGSGGGGSGGGGSQVQLVQSGSELKKPGAS |
| | | VKVSCKASGYTFTSY |
| | | WMNWVRQAPGQGLEWMGRIDPYDSETHYNQKFKDRFVFSVDKSV |
| | | STAYLQISSLKAEDTA |
| | | VYYCARGNWDDYWGQGTTVTVSSTTTPAPRPPTPAPTIASQPLSLR |
| | | PEACRPAAGGAVHT |
| | | RGLDFACDIYIWAPLAGTCGVLLLSLVITLYCKRGRKKLLYIFKQPF |
| | | MRPVQTTQEEDGC |
| | | SCRFPEEEEGGCELRVKFSRSADAPAYKQGQNQLYNELNLGRREEY |
| | | DVLDKRRGRDPEMG |
| | | GKPRRKNPQEGLYNELQKDKMAEAYSEIGMKGERRRGKGHDGLY |
| | | QGLSTATKDTYDALHM |
| | | QALPPR |
| hzCAR123-15 | 2496 | MALPVTALLLPLALLLHAARPDVVMTQSPAFLSVTPGEKVTITCRAS |
| scFv | | KSISKDLAWYQQK |
| | | PDQAPKLLIYSGSTLQSGVPSRFSGSGSGTDFTFTISSLEAEDAATYY |
| | | CQQHNKYPYTFG |
| | | GGTKVEIKGGGGSGGGGSGGGGSGGGGSQVQLVQSGSELKKPGAS |
| | | VKVSCKASGYTFTSY |
| | | WMNWVRQAPGQGLEWMGRIDPYDSETHYNQKFKDRFVFSVDKSV |
| | | STAYLQISSLKAEDTA |
| | | VYYCARGNWDDYWGQGTTVTVSS |
| hzCAR123-15 | 2478 | QVQLVQSGSELKKPGASVKVSCKASGYTFTSYWMNWVRQAPGQG |
| VH | | LEWMGRIDPYDSETHYNQKFKDRFVFSVDKSVSTAYLQISSLKAED |
| | | TAVYYCARGNWDDYWGQGTTVTVSS |
| hzCAR123-15 | 2458 | DVVMTQSPAFLSVTPGEKVTITCRASKSISKDLAWYQQKPDQAPKL |
| VL | | LIYSGSTLQSGVPSRFSGSGSGTDFTFTISSLEAEDAATYYCQQHNKY |
| | | PYTFGGGTKVEIK |
| hzCAR123-16 | 2497 | ATGGCCCTCCCTGTCACCGCCCTGCTGCTTCCGCTGGCTCTTCTG |
| NT | | CTCCACGCCGCTCGGCCCGACGTGGTCATGACTCAGTCCCCGGA |
| | | CTCACTCGCGGTGTCGCTTGGAGAGAGAGCGACCATCAACTGTC |
| | | GGGCCTCAAAGAGCATCAGCAAGGACCTGGCCTGGTACCAGCAG |
| | | AAGCCGGGACAGCCGCCAAAGCTGCTGATCTACTCCGGGTCCAC |
| | | CTTGCAATCTGGTGTCCCTGACCGGTTCTCCGGTTCCGGGTCGGG |
| | | TACCGACTTCACGCTCACTATTTCGTCGCTGCAAGCCGAAGATGT |
| | | GGCCGTGTACTATTGCCAACAGCACAACAAGTACCCCTACACTTT |
| | | TGGCGGAGGCACCAAGGTGGAAATCAAGGGGGGTGGCGGTAGC |
| | | GGAGGAGGGGGCTCCGGCGGCGGCGGCTCAGGGGGCGGAGGAA |
| | | GCCAAGTGCAGCTGGTGCAGTCAGGCAGCGAACTGAAGAAGCCC |
| | | GGAGCCTCCGTCAAAGTGTCCTGCAAAGCCTCGGGATACACCTT |
| | | CACCTCCTACTGGATGAACTGGGTCCGCCAGGCACCTGGACAGG |
| | | GGCTGGAGTGGATGGGAAGGATCGATCCCTACGATTCCGAAACC |
| | | CATTACAATCAGAAGTTCAAGGACCGGTTTGTGTTCTCCGTGGAC |
| | | AAGTCCGTGTCCACCGCCTACCTCCAAATTAGCAGCCTGAAGGC |
| | | GGAGGATACAGCTGTCTACTACTGCGCTCGCGGAAACTGGGATG |
| | | ACTATTGGGGCCAGGGAACTACCGTGACTGTGTCCTCCACCACT |
| | | ACCCCAGCACCGAGGCCACCCACCCCGGCTCCTACCATCGCCTC |
| | | CCAGCCTCTGTCCCTGCGTCCGGAggcatgtagacccgcagctggtggggccgtgc |
| | | atacccggggtcttgacttcgcctgcgatatctacatttgggcccctctggctggtacttgcggggtcctgctg |
| | | ctttcactcgtgatcactctttactgtaagcgcggtcggaagaagctgctgtacatctttaagcaacccttcatg |
| | | aggcctgtgcagactactcaagaggaggacggctgttcatgccggttcccagaggaggaggaaggcggc |
| | | tgcgaactgcgcgtgaaattcagccgcagcgcagatgctccagcctacaagcaggggcagaaccagctct |
| | | acaacgaactcaatcttggtcggagagaggagtacgacgtgctggacaagcggagaggacgggaccca |
| | | gaaatgggcgggaagccgcgcagaaagaatccccaagagggcctgtacaacgagctccaaaaggataa |
| | | gatggcagaagcctatagcgagattggtatgaaaggggaacgcagaagaggcaaaggccacgacggac |
| | | tgtaccagggactcagcaccgccaccaaggacacctatgacgctcttcacatgcaggccctgccgcctcg |
| | | g |
| hzCAR123-16 | 2498 | MALPVTALLLPLALLLHAARPDVVMTQSPDSLAVSLGERATINCRA |
| AA | | SKSISKDLAWYQQK |
| | | PGQPPKLLIYSGSTLQSGVPDRFSGSGSGTDFTLTISSLQAEDVAVYY |
| | | CQQHNKYPYTFG |
| | | GGTKVEIKGGGGSGGGGSGGGGSGGGGSQVQLVQSGSELKKPGAS |
| | | VKVSCKASGYTFTSY |
| | | WMNWVRQAPGQGLEWMGRIDPYDSETHYNQKFKDRFVFSVDKSV |
| | | STAYLQISSLKAEDTA |
| | | VYYCARGNWDDYWGQGTTVTVSSTTTPAPRPPTPAPTIASQPLSLR |
| | | PEACRPAAGGAVHT |
| | | RGLDFACDIYIWAPLAGTCGVLLLSLVITLYCKRGRKKLLYIFKQPF |
| | | MRPVQTTQEEDGC |
| | | SCRFPEEEEGGCELRVKFSRSADAPAYKQGQNQLYNELNLGRREEY |
| | | DVLDKRRGRDPEMG |
| | | GKPRRKNPQEGLYNELQKDKMAEAYSEIGMKGERRRGKGHDGLY |
| | | QGLSTATKDTYDALHM |
| | | QALPPR |
| hzCAR123-16 | 2499 | MALPVTALLLPLALLLHAARPDVVMTQSPDSLAVSLGERATINCRA |
| scFv | | SKSISKDLAWYQQK |
| | | PGQPPKLLIYSGSTLQSGVPDRFSGSGSGTDFTLTISSLQAEDVAVYY |
| | | CQQHNKYPYTFG |
| | | GGTKVEIKGGGGSGGGGSGGGGSGGGGSQVQLVQSGSELKKPGAS |
| | | VKVSCKASGYTFTSY |
| | | WMNWVRQAPGQGLEWMGRIDPYDSETHYNQKFKDRFVFSVDKSV |
| | | STAYLQISSLKAEDTA |
| | | VYYCARGNWDDYWGQGTTVTVSS |
| hzCAR123-16 | 2478 | QVQLVQSGSELKKPGASVKVSCKASGYTFTSYWMNWVRQAPGQG |
| VH | | LEWMGRIDPYDSETHYNQKFKDRFVFSVDKSVSTAYLQISSLKAED |
| | | TAVYYCARGNWDDYWGQGTTVTVSS |
| hzCAR123-16 | 2462 | DVVMTQSPDSLAVSLGERATINCRASKSISKDLAWYQQKPGQPPKL |
| VL | | LIYSGSTLQSGVPDRFSGSGSGTDFTLTISSLQAEDVAVYYCQQHNK |
| | | YPYTFGGGTKVEIK |
| hzCAR123-17 | 2500 | ATGGCCCTCCCTGTCACCGCCCTGCTGCTTCCGCTGGCTCTTCTG |
| NT | | CTCCACGCCGCTCGGCCCGAGGTGCAGCTGGTGCAGAGCGGAGC |
| | | CGAGGTCAAGAAGCCTGGAGAATCCCTGAGGATCAGCTGCAAAG |
| | | GCAGCGGGTATACCTTCACCTCCTACTGGATGAATTGGGTCCGCC |
| | | AGATGCCCGGAAAAGGCCTGGAGTGGATGGGACGGATTGACCCC |
| | | TACGACTCGGAAACCCATTACAACCAGAAGTTCAAGGATCACGT |
| | | GACCATCTCCGTGGACAAGTCCATTTCCACTGCGTACCTCCAGTG |
| | | GTCAAGCCTGAAGGCCTCCGACACTGCTATGTACTACTGCGCAC |
| | | GCGGAAACTGGGATGATTACTGGGGACAGGGAACAACCGTGACT |
| | | GTGTCCTCCGGGGGTGGCGGTAGCGGAGGAGGGGGCTCCGGCGG |
| | | CGGCGGCTCAGGGGGCGGAGGAAGCGACGTGCAGCTCACCCAG |
| | | TCGCCCTCATTTCTGTCGGCCTCAGTGGGAGACAGAGTGACCATT |
| | | ACTTGTCGGGCCTCCAAGAGCATCTCCAAGGACCTGGCCTGGTA |
| | | TCAGCAGAAGCCAGGAAAGGCGCCTAAGTTGCTCATCTACTCGG |
| | | GGTCGACCCTGCAATCTGGCGTGCCGTCCCGGTTCTCCGGTTCGG |
| | | GAAGCGGTACCGAATTCACCCTTACTATCTCCTCCCTGCAACCGG |
| | | AGGACTTCGCCACCTACTACTGCCAACAGCACAACAAGTACCCG |
| | | TACACTTTCGGGGGTGGCACGAAGGTCGAAATCAAGACCACTAC |
| | | CCCAGCACCGAGGCCACCCACCCCGGCTCCTACCATCGCCTCCC |
| | | AGCCTCTGTCCCTGCGTCCGGAggcatgtagacccgcagctggtggggccgtgcata |
| | | cccggggtcttgacttcgcctgcgatatctacatttgggcccctctggctggtacttgcggggtcctgctgcttt |
| | | cactcgtgatcactctttactgtaagcgcggtcggaagaagctgctgtacatctttaagcaacccttcatgagg |
| | | cctgtgcagactactcaagaggaggacggctgttcatgccggttcccagaggaggaggaaggcggctgc |
| | | gaactgcgcgtgaaattcagccgcagcgcagatgctccagcctacaagcaggggcagaaccagctctac |
| | | aacgaactcaatcttggtcggagagaggagtacgacgtgctggacaagcggagaggacgggacccaga |
| | | aatgggcgggaagccgcgcagaaagaatccccaagagggcctgtacaacgagctccaaaaggataaga |
| | | tggcagaagcctatagcgagattggtatgaaaggggaacgcagaagaggcaaaggccacgacggactgt |
| | | accagggactcagcaccgccaccaaggacacctatgacgctcttcacatgcaggccctgccgcctcgg |
| hzCAR123-17 | 2501 | MALPVTALLLPLALLLHAARPEVQLVQSGAEVKKPGESLRISCKGS |
| AA | | GYTFTSYWMNWVRQ |
| | | MPGKGLEWMGRIDPYDSETHYNQKFKDHVTISVDKSISTAYLQWSS |
| | | LKASDTAMYYCARG |
| | | NWDDYWGQGTTVTVSSGGGGSGGGGSGGGGSGGGGSDVQLTQSP |
| | | SFLSASVGDRVTITCR |
| | | ASKSISKDLAWYQQKPGKAPKLLIYSGSTLQSGVPSRFSGSGSGTEF |
| | | TLTISSLQPEDFA |
| | | TYYCQQHNKYPYTFGGGTKVEIKTTTPAPRPPTPAPTIASQPLSLRPE |
| | | ACRPAAGGAVHT |
| | | RGLDFACDIYIWAPLAGTCGVLLLSLVITLYCKRGRKKLLYIFKQPF |
| | | MRPVQTTQEEDGC |
| | | SCRFPEEEEGGCELRVKFSRSADAPAYKQGQNQLYNELNLGRREEY |
| | | DVLDKRRGRDPEMG |
| | | GKPRRKNPQEGLYNELQKDKMAEAYSEIGMKGERRRGKGHDGLY |
| | | QGLSTATKDTYDALHM |
| | | QALPPR |
| hzCAR123-17 | 2502 | MALPVTALLLPLALLLHAARPEVQLVQSGAEVKKPGESLRISCKGS |
| scFv | | GYTFTSYWMNWVRQ |
| | | MPGKGLEWMGRIDPYDSETHYNQKFKDHVTISVDKSISTAYLQWSS |
| | | LKASDTAMYYCARG |
| | | NWDDYWGQGTTVTVSSGGGGSGGGGSGGGGSGGGGSDVQLTQSP |
| | | SFLSASVGDRVTITCR |
| | | ASKSISKDLAWYQQKPGKAPKLLIYSGSTLQSGVPSRFSGSGSGTEF |
| | | TLTISSLQPEDFA |
| | | TYYCQQHNKYPYTFGGGTKVEIK |
| hzCAR123-17 | 2503 | EVQLVQSGAEVKKPGESLRISCKGSGYTFTSYWMNWVRQMPGKGL |
| VH | | EWMGRIDPYDSETHYNQKFKDHVTISVDKSISTAYLQWSSLKASDT |
| | | AMYYCARGNWDDYWGQGTTVTVSS |
| hzCAR123-17 | 2450 | DVQLTQSPSFLSASVGDRVTITCRASKSISKDLAWYQQKPGKAPKLL |
| VL | | IYSGSTLQSGVPSRFSGSGSGTEFTLTISSLQPEDFATYYCQQHNKYP |
| | | YTFGGGTKVEIK |
| hzCAR123-18 | 2504 | ATGGCCCTCCCTGTCACCGCCCTGCTGCTTCCGCTGGCTCTTCTG |
| NT | | CTCCACGCCGCTCGGCCCGAGGTGCAGCTGGTGCAGAGCGGAGC |
| | | CGAGGTCAAGAAGCCTGGAGAATCCCTGAGGATCAGCTGCAAAG |
| | | GCAGCGGGTATACCTTCACCTCCTACTGGATGAATTGGGTCCGCC |
| | | AGATGCCCGGAAAAGGCCTGGAGTGGATGGGACGGATTGACCCC |
| | | TACGACTCGGAAACCCATTACAACCAGAAGTTCAAGGATCACGT |
| | | GACCATCTCCGTGGACAAGTCCATTTCCACTGCGTACCTCCAGTG |
| | | GTCAAGCCTGAAGGCCTCCGACACTGCTATGTACTACTGCGCAC |
| | | GCGGAAACTGGGATGATTACTGGGGACAGGGAACAACCGTGACT |
| | | GTGTCCTCCGGGGGTGGCGGTAGCGGAGGAGGGGGCTCCGGCGG |
| | | CGGCGGCTCAGGGGGCGGAGGAAGCGAAGTGGTGCTGACCCAG |
| | | TCGCCCGCAACCCTCTCTCTGTCGCCGGGAGAACGCGCCACTCTT |
| | | TCCTGTCGGGCGTCCAAGAGCATCTCAAAGGACCTCGCCTGGTA |
| | | CCAGCAGAAGCCTGGTCAAGCCCCGCGGCTGCTGATCTACTCCG |
| | | GCTCCACGCTGCAATCAGGAATCCCAGCCAGATTTTCCGGTTCGG |
| | | GGTCGGGGACTGACTTCACCTTGACCATTAGCTCGCTGGAACCTG |
| | | AGGACTTCGCCGTGTATTACTGCCAGCAGCACAACAAGTACCCG |
| | | TACACCTTCGGAGGCGGTACTAAGGTCGAGATCAAGACCACTAC |
| | | CCCAGCACCGAGGCCACCCACCCCGGCTCCTACCATCGCCTCCC |
| | | AGCCTCTGTCCCTGCGTCCGGAggcatgtagacccgcagctggtggggccgtgcata |
| | | cccggggtcttgacttcgcctgcgatatctacatttgggcccctctggctggtacttgcggggtcctgctgcttt |
| | | cactcgtgatcactctttactgtaagcgcggtcggaagaagctgctgtacatctttaagcaacccttcatgagg |
| | | cctgtgcagactactcaagaggaggacggctgttcatgccggttcccagaggaggaggaaggcggctgc |
| | | gaactgcgcgtgaaattcagccgcagcgcagatgctccagcctacaagcaggggcagaaccagctctac |
| | | aacgaactcaatcttggtcggagagaggagtacgacgtgctggacaagcggagaggacgggacccaga |
| | | aatgggcgggaagccgcgcagaaagaatccccaagagggcctgtacaacgagctccaaaaggataaga |
| | | tggcagaagcctatagcgagattggtatgaaaggggaacgcagaagaggcaaaggccacgacggactgt |
| | | accagggactcagcaccgccaccaaggacacctatgacgctcttcacatgcaggccctgccgcctcgg |
| hzCAR123-18 | 2505 | MALPVTALLLPLALLLHAARPEVQLVQSGAEVKKPGESLRISCKGS |
| AA | | GYTFTSYWMNWVRQ |
| | | MPGKGLEWMGRIDPYDSETHYNQKFKDHVTISVDKSISTAYLQWSS |
| | | LKASDTAMYYCARG |
| | | NWDDYWGQGTTVTVSSGGGGSGGGGSGGGGSGGGGSEVVLTQSP |
| | | ATLSLSPGERATLSCR |
| | | ASKSISKDLAWYQQKPGQAPRLLIYSGSTLQSGIPARFSGSGSGTDFT |
| | | LTISSLEPEDFA |
| | | VYYCQQHNKYPYTFGGGTKVEIKTTTPAPRPPTPAPTIASQPLSLRPE |
| | | ACRPAAGGAVHT |
| | | RGLDFACDIYIWAPLAGTCGVLLLSLVITLYCKRGRKKLLYIFKQPF |
| | | MRPVQTTQEEDGC |
| | | SCRFPEEEEGGCELRVKFSRSADAPAYKQGQNQLYNELNLGRREEY |
| | | DVLDKRRGRDPEMG |
| | | GKPRRKNPQEGLYNELQKDKMAEAYSEIGMKGERRRGKGHDGLY |
| | | QGLSTATKDTYDALHM |
| | | QALPPR |
| hzCAR123-18 | 2506 | MALPVTALLLPLALLLHAARPEVQLVQSGAEVKKPGESLRISCKGS |
| scFv | | GYTFTSYWMNWVRQ |
| | | MPGKGLEWMGRIDPYDSETHYNQKFKDHVTISVDKSISTAYLQWSS |
| | | LKASDTAMYYCARG |
| | | NWDDYWGQGTTVTVSSGGGGSGGGGSGGGGSGGGGSEVVLTQSP |
| | | ATLSLSPGERATLSCR |
| | | ASKSISKDLAWYQQKPGQAPRLLIYSGSTLQSGIPARFSGSGSGTDFT |
| | | LTISSLEPEDFA |
| | | VYYCQQHNKYPYTFGGGTKVEIK |
| hzCAR123-18 | 2503 | EVQLVQSGAEVKKPGESLRISCKGSGYTFTSYWMNWVRQMPGKGL |
| VH | | EWMGRIDPYDSETHYNQKFKDHVTISVDKSISTAYLQWSSLKASDT |
| | | AMYYCARGNWDDYWGQGTTVTVSS |
| hzCAR123-18 | 2454 | EVVLTQSPATLSLSPGERATLSCRASKSISKDLAWYQQKPGQAPRLL |
| VL | | IYSGSTLQSGIPARFSGSGSGTDFTLTISSLEPEDFAVYYCQQHNKYP |
| | | YTFGGGTKVEIK |
| hzCAR123-19 | 2507 | ATGGCCCTCCCTGTCACCGCCCTGCTGCTTCCGCTGGCTCTTCTG |
| NT | | CTCCACGCCGCTCGGCCCGAGGTGCAGCTGGTGCAGAGCGGAGC |
| | | CGAGGTCAAGAAGCCTGGAGAATCCCTGAGGATCAGCTGCAAAG |
| | | GCAGCGGGTATACCTTCACCTCCTACTGGATGAATTGGGTCCGCC |
| | | AGATGCCCGGAAAAGGCCTGGAGTGGATGGGACGGATTGACCCC |
| | | TACGACTCGGAAACCCATTACAACCAGAAGTTCAAGGATCACGT |
| | | GACCATCTCCGTGGACAAGTCCATTTCCACTGCGTACCTCCAGTG |
| | | GTCAAGCCTGAAGGCCTCCGACACTGCTATGTACTACTGCGCAC |
| | | GCGGAAACTGGGATGATTACTGGGGACAGGGAACAACCGTGACT |
| | | GTGTCCTCCGGGGGTGGCGGTAGCGGAGGAGGGGGCTCCGGCGG |
| | | CGGCGGCTCAGGGGGCGGAGGAAGCGACGTCGTGATGACCCAG |
| | | TCACCGGCATTCCTGTCCGTGACTCCCGGAGAAAAGGTCACGAT |
| | | TACTTGCCGGGCGTCCAAGAGCATCTCCAAGGACCTCGCCTGGT |
| | | ACCAACAGAAGCCGGACCAGGCCCCTAAGCTGTTGATCTACTCG |
| | | GGGTCCACCCTTCAATCGGGAGTGCCATCGCGGTTTAGCGGTTCG |
| | | GGTTCTGGGACCGACTTCACTTTCACCATCTCCTCACTGGAAGCC |
| | | GAGGATGCCGCCACTTACTACTGTCAGCAGCACAACAAGTATCC |
| | | GTACACCTTCGGAGGCGGTACCAAAGTGGAGATCAAGACCACTA |
| | | CCCCAGCACCGAGGCCACCCACCCCGGCTCCTACCATCGCCTCCC |
| | | AGCCTCTGTCCCTGCGTCCGGAggcatgtagacccgcagctggtggggccgtgcata |
| | | cccggggtcttgacttcgcctgcgatatctacatttgggcccctctggctggtacttgcggggtcctgctgcttt |
| | | cactcgtgatcactctttactgtaagcgcggtcggaagaagctgctgtacatctttaagcaacccttcatgagg |
| | | cctgtgcagactactcaagaggaggacggctgttcatgccggttcccagaggaggaggaaggcggctgc |
| | | gaactgcgcgtgaaattcagccgcagcgcagatgctccagcctacaagcaggggcagaaccagctctac |
| | | aacgaactcaatcttggtcggagagaggagtacgacgtgctggacaagcggagaggacgggacccaga |
| | | aatgggcgggaagccgcgcagaaagaatccccaagagggcctgtacaacgagctccaaaaggataaga |
| | | tggcagaagcctatagcgagattggtatgaaaggggaacgcagaagaggcaaaggccacgacggactgt |
| | | accagggactcagcaccgccaccaaggacacctatgacgctcttcacatgcaggccctgccgcctcgg |
| hzCAR123-19 | 2508 | MALPVTALLLPLALLLHAARPEVQLVQSGAEVKKPGESLRISCKGS |
| AA | | GYTFTSYWMNWVRQ |
| | | MPGKGLEWMGRIDPYDSETHYNQKFKDHVTISVDKSISTAYLQWSS |
| | | LKASDTAMYYCARG |
| | | NWDDYWGQGTTVTVSSGGGGSGGGGSGGGGSGGGGSDVVMTQS |
| | | PAFLSVTPGEKVTITCR |
| | | ASKSISKDLAWYQQKPDQAPKLLIYSGSTLQSGVPSRFSGSGSGTDF |
| | | TFTISSLEAEDAA |
| | | TYYCQQHNKYPYTFGGGTKVEIKTTTPAPRPPTPAPTIASQPLSLRPE |
| | | ACRPAAGGAVHT |
| | | RGLDFACDIYIWAPLAGTCGVLLLSLVITLYCKRGRKKLLYIFKQPF |
| | | MRPVQTTQEEDGC |
| | | SCRFPEEEEGGCELRVKFSRSADAPAYKQGQNQLYNELNLGRREEY |
| | | DVLDKRRGRDPEMG |
| | | GKPRRKNPQEGLYNELQKDKMAEAYSEIGMKGERRRGKGHDGLY |
| | | QGLSTATKDTYDALHM |
| | | QALPPR |
| hzCAR123-19 | 2509 | MALPVTALLLPLALLLHAARPEVQLVQSGAEVKKPGESLRISCKGS |
| scFv | | GYTFTSYWMNWVRQ |
| | | MPGKGLEWMGRIDPYDSETHYNQKFKDHVTISVDKSISTAYLQWSS |
| | | LKASDTAMYYCARG |
| | | NWDDYWGQGTTVTVSSGGGGSGGGGSGGGGSGGGGSDVVMTQS |
| | | PAFLSVTPGEKVTITCR |
| | | ASKSISKDLAWYQQKPDQAPKLLIYSGSTLQSGVPSRFSGSGSGTDF |
| | | TFTISSLEAEDAA |
| | | TYYCQQHNKYPYTFGGGTKVEIK |
| hzCAR123-19 | 2503 | EVQLVQSGAEVKKPGESLRISCKGSGYTFTSYWMNWVRQMPGKGL |
| VH | | EWMGRIDPYDSETHYNQKFKDHVTISVDKSISTAYLQWSSLKASDT |
| | | AMYYCARGNWDDYWGQGTTVTVSS |
| hzCAR123-19 | 2458 | DVVMTQSPAFLSVTPGEKVTITCRASKSISKDLAWYQQKPDQAPKL |
| VL | | LIYSGSTLQSGVPSRFSGSGSGTDFTFTISSLEAEDAATYYCQQHNKY |
| | | PYTFGGGTKVEIK |
| hzCAR123-20 | 2510 | ATGGCCCTCCCTGTCACCGCCCTGCTGCTTCCGCTGGCTCTTCTG |
| NT | | CTCCACGCCGCTCGGCCCGAGGTGCAGCTGGTGCAGAGCGGAGC |
| | | CGAGGTCAAGAAGCCTGGAGAATCCCTGAGGATCAGCTGCAAAG |
| | | GCAGCGGGTATACCTTCACCTCCTACTGGATGAATTGGGTCCGCC |
| | | AGATGCCCGGAAAAGGCCTGGAGTGGATGGGACGGATTGACCCC |
| | | TACGACTCGGAAACCCATTACAACCAGAAGTTCAAGGATCACGT |
| | | GACCATCTCCGTGGACAAGTCCATTTCCACTGCGTACCTCCAGTG |
| | | GTCAAGCCTGAAGGCCTCCGACACTGCTATGTACTACTGCGCAC |
| | | GCGGAAACTGGGATGATTACTGGGGACAGGGAACAACCGTGACT |
| | | GTGTCCTCCGGGGGTGGCGGTAGCGGAGGAGGGGGCTCCGGCGG |
| | | CGGCGGCTCAGGGGGCGGAGGAAGCGACGTGGTCATGACTCAGT |
| | | CCCCGGACTCACTCGCGGTGTCGCTTGGAGAGAGAGCGACCATC |
| | | AACTGTCGGGCCTCAAAGAGCATCAGCAAGGACCTGGCCTGGTA |
| | | CCAGCAGAAGCCGGGACAGCCGCCAAAGCTGCTGATCTACTCCG |
| | | GGTCCACCTTGCAATCTGGTGTCCCTGACCGGTTCTCCGGTTCCG |
| | | GGTCGGGTACCGACTTCACGCTCACTATTTCGTCGCTGCAAGCCG |
| | | AAGATGTGGCCGTGTACTATTGCCAACAGCACAACAAGTACCCC |
| | | TACACTTTTGGCGGAGGCACCAAGGTGGAAATCAAGACCACTAC |
| | | CCCAGCACCGAGGCCACCCACCCCGGCTCCTACCATCGCCTCCC |
| | | AGCCTCTGTCCCTGCGTCCGGAggcatgtagacccgcagctggtggggccgtgcata |
| | | cccggggtcttgacttcgcctgcgatatctacatttgggcccctctggctggtacttgcggggtcctgctgcttt |
| | | cactcgtgatcactctttactgtaagcgcggtcggaagaagctgctgtacatctttaagcaacccttcatgagg |
| | | cctgtgcagactactcaagaggaggacggctgttcatgccggttcccagaggaggaggaaggcggctgc |
| | | gaactgcgcgtgaaattcagccgcagcgcagatgctccagcctacaagcaggggcagaaccagctctac |
| | | aacgaactcaatcttggtcggagagaggagtacgacgtgctggacaagcggagaggacgggacccaga |
| | | aatgggcgggaagccgcgcagaaagaatccccaagagggcctgtacaacgagctccaaaaggataaga |
| | | tggcagaagcctatagcgagattggtatgaaaggggaacgcagaagaggcaaaggccacgacggactgt |
| | | accagggactcagcaccgccaccaaggacacctatgacgctcttcacatgcaggccctgccgcctcgg |
| hzCAR123-20 | 2511 | MALPVTALLLPLALLLHAARPEVQLVQSGAEVKKPGESLRISCKGS |
| AA | | GYTFTSYWMNWVRQ |
| | | MPGKGLEWMGRIDPYDSETHYNQKFKDHVTISVDKSISTAYLQWSS |
| | | LKASDTAMYYCARG |
| | | NWDDYWGQGTTVTVSSGGGGSGGGGSGGGGSGGGGSDVVMTQS |
| | | PDSLAVSLGERATINCR |
| | | ASKSISKDLAWYQQKPGQPPKLLIYSGSTLQSGVPDRFSGSGSGTDF |
| | | TLTISSLQAEDVA |
| | | VYYCQQHNKYPYTFGGGTKVEIKTTTPAPRPPTPAPTIASQPLSLRPE |
| | | ACRPAAGGAVHT |
| | | RGLDFACDIYIWAPLAGTCGVLLLSLVITLYCKRGRKKLLYIFKQPF |
| | | MRPVQTTQEEDGC |
| | | SCRFPEEEEGGCELRVKFSRSADAPAYKQGQNQLYNELNLGRREEY |
| | | DVLDKRRGRDPEMG |
| | | GKPRRKNPQEGLYNELQKDKMAEAYSEIGMKGERRRGKGHDGLY |
| | | QGLSTATKDTYDALHM |
| | | QALPPR |
| hzCAR123-20 | 2512 | MALPVTALLLPLALLLHAARPEVQLVQSGAEVKKPGESLRISCKGS |
| scFv | | GYTFTSYWMNWVRQ |
| | | MPGKGLEWMGRIDPYDSETHYNQKFKDHVTISVDKSISTAYLQWSS |
| | | LKASDTAMYYCARG |
| | | NWDDYWGQGTTVTVSSGGGGSGGGGSGGGGSGGGGSDVVMTQS |
| | | PDSLAVSLGERATINCR |
| | | ASKSISKDLAWYQQKPGQPPKLLIYSGSTLQSGVPDRFSGSGSGTDF |
| | | TLTISSLQAEDVA |
| | | VYYCQQHNKYPYTFGGGTKVEIK |
| hzCAR123-20 | 2503 | EVQLVQSGAEVKKPGESLRISCKGSGYTFTSYWMNWVRQMPGKGL |
| VH | | EWMGRIDPYDSETHYNQKFKDHVTISVDKSISTAYLQWSSLKASDT |
| | | AMYYCARGNWDDYWGQGTTVTVSS |
| hzCAR123-20 | 2462 | DVVMTQSPDSLAVSLGERATINCRASKSISKDLAWYQQKPGQPPKL |
| VL | | LIYSGSTLQSGVPDRFSGSGSGTDFTLTISSLQAEDVAVYYCQQHNK |
| | | YPYTFGGGTKVEIK |
| hzCAR123-21 | 2513 | ATGGCCCTCCCTGTCACCGCCCTGCTGCTTCCGCTGGCTCTTCTG |
| NT | | CTCCACGCCGCTCGGCCCGACGTGCAGCTCACCCAGTCGCCCTCA |
| | | TTTCTGTCGGCCTCAGTGGGAGACAGAGTGACCATTACTTGTCGG |
| | | GCCTCCAAGAGCATCTCCAAGGACCTGGCCTGGTATCAGCAGAA |
| | | GCCAGGAAAGGCGCCTAAGTTGCTCATCTACTCGGGGTCGACCC |
| | | TGCAATCTGGCGTGCCGTCCCGGTTCTCCGGTTCGGGAAGCGGTA |
| | | CCGAATTCACCCTTACTATCTCCTCCCTGCAACCGGAGGACTTCG |
| | | CCACCTACTACTGCCAACAGCACAACAAGTACCCGTACACTTTC |
| | | GGGGGTGGCACGAAGGTCGAAATCAAGGGGGGTGGCGGTAGCG |
| | | GAGGAGGGGGCTCCGGCGGCGGCGGCTCAGGGGGCGGAGGAAG |
| | | CGAGGTGCAGCTGGTGCAGAGCGGAGCCGAGGTCAAGAAGCCT |
| | | GGAGAATCCCTGAGGATCAGCTGCAAAGGCAGCGGGTATACCTT |
| | | CACCTCCTACTGGATGAATTGGGTCCGCCAGATGCCCGGAAAAG |
| | | GCCTGGAGTGGATGGGACGGATTGACCCCTACGACTCGGAAACC |
| | | CATTACAACCAGAAGTTCAAGGATCACGTGACCATCTCCGTGGA |
| | | CAAGTCCATTTCCACTGCGTACCTCCAGTGGTCAAGCCTGAAGGC |
| | | CTCCGACACTGCTATGTACTACTGCGCACGCGGAAACTGGGATG |
| | | ATTACTGGGGACAGGGAACAACCGTGACTGTGTCCTCCACCACT |
| | | ACCCCAGCACCGAGGCCACCCACCCCGGCTCCTACCATCGCCTC |
| | | CCAGCCTCTGTCCCTGCGTCCGGAggcatgtagacccgcagctggtggggccgtgc |
| | | atacccggggtcttgacttcgcctgcgatatctacatttgggcccctctggctggtacttgcggggtcctgctg |
| | | ctttcactcgtgatcactctttactgtaagcgcggtcggaagaagctgctgtacatctttaagcaacccttcatg |
| | | aggcctgtgcagactactcaagaggaggacggctgttcatgccggttcccagaggaggaggaaggcggc |
| | | tgcgaactgcgcgtgaaattcagccgcagcgcagatgctccagcctacaagcaggggcagaaccagctct |
| | | acaacgaactcaatcttggtcggagagaggagtacgacgtgctggacaagcggagaggacgggaccca |
| | | gaaatgggcgggaagccgcgcagaaagaatccccaagagggcctgtacaacgagctccaaaaggataa |
| | | gatggcagaagcctatagcgagattggtatgaaaggggaacgcagaagaggcaaaggccacgacggac |
| | | tgtaccagggactcagcaccgccaccaaggacacctatgacgctcttcacatgcaggccctgccgcctcg |
| | | g |
| hzCAR123-21 | 2514 | MALPVTALLLPLALLLHAARPDVQLTQSPSFLSASVGDRVTITCRAS |
| AA | | KSISKDLAWYQQK |
| | | PGKAPKLLIYSGSTLQSGVPSRFSGSGSGTEFTLTISSLQPEDFATYYC |
| | | QQHNKYPYTFG |
| | | GGTKVEIKGGGGSGGGGSGGGGSGGGGSEVQLVQSGAEVKKPGES |
| | | LRISCKGSGYTFTSY |
| | | WMNWVRQMPGKGLEWMGRIDPYDSETHYNQKFKDHVTISVDKSI |
| | | STAYLQWSSLKASDTA |
| | | MYYCARGNWDDYWGQGTTVTVSSTTTPAPRPPTPAPTIASQPLSLR |
| | | PEACRPAAGGAVHT |
| | | RGLDFACDIYIWAPLAGTCGVLLLSLVITLYCKRGRKKLLYIFKQPF |
| | | MRPVQTTQEEDGC |
| | | SCRFPEEEEGGCELRVKFSRSADAPAYKQGQNQLYNELNLGRREEY |
| | | DVLDKRRGRDPEMG |
| | | GKPRRKNPQEGLYNELQKDKMAEAYSEIGMKGERRRGKGHDGLY |
| | | QGLSTATKDTYDALHM |
| | | QALPPR |
| hzCAR123-21 | 2515 | MALPVTALLLPLALLLHAARPDVQLTQSPSFLSASVGDRVTITCRAS |
| scFv | | KSISKDLAWYQQK |
| | | PGKAPKLLIYSGSTLQSGVPSRFSGSGSGTEFTLTISSLQPEDFATYYC |
| | | QQHNKYPYTFG |
| | | GGTKVEIKGGGGSGGGGSGGGGSGGGGSEVQLVQSGAEVKKPGES |
| | | LRISCKGSGYTFTSY |
| | | WMNWVRQMPGKGLEWMGRIDPYDSETHYNQKFKDHVTISVDKSI |
| | | STAYLQWSSLKASDTA |
| | | MYYCARGNWDDYWGQGTTVTVSS |
| hzCAR123-21 | 2503 | EVQLVQSGAEVKKPGESLRISCKGSGYTFTSYWMNWVRQMPGKGL |
| VH | | EWMGRIDPYDSETHYNQKFKDHVTISVDKSISTAYLQWSSLKASDT |
| | | AMYYCARGNWDDYWGQGTTVTVSS |
| hzCAR123-21 | 2450 | DVQLTQSPSFLSASVGDRVTITCRASKSISKDLAWYQQKPGKAPKLL |
| VL | | IYSGSTLQSGVPSRFSGSGSGTEFTLTISSLQPEDFATYYCQQHNKYP |
| | | YTFGGGTKVEIK |
| hzCAR123-22 | 2516 | ATGGCCCTCCCTGTCACCGCCCTGCTGCTTCCGCTGGCTCTTCTG |
| NT | | CTCCACGCCGCTCGGCCCGAAGTGGTGCTGACCCAGTCGCCCGC |
| | | AACCCTCTCTCTGTCGCCGGGAGAACGCGCCACTCTTTCCTGTCG |
| | | GGCGTCCAAGAGCATCTCAAAGGACCTCGCCTGGTACCAGCAGA |
| | | AGCCTGGTCAAGCCCCGCGGCTGCTGATCTACTCCGGCTCCACGC |
| | | TGCAATCAGGAATCCCAGCCAGATTTTCCGGTTCGGGGTCGGGG |
| | | ACTGACTTCACCTTGACCATTAGCTCGCTGGAACCTGAGGACTTC |
| | | GCCGTGTATTACTGCCAGCAGCACAACAAGTACCCGTACACCTT |
| | | CGGAGGCGGTACTAAGGTCGAGATCAAGGGGGGTGGCGGTAGC |
| | | GGAGGAGGGGGCTCCGGCGGCGGCGGCTCAGGGGGCGGAGGAA |
| | | GCGAGGTGCAGCTGGTGCAGAGCGGAGCCGAGGTCAAGAAGCC |
| | | TGGAGAATCCCTGAGGATCAGCTGCAAAGGCAGCGGGTATACCT |
| | | TCACCTCCTACTGGATGAATTGGGTCCGCCAGATGCCCGGAAAA |
| | | GGCCTGGAGTGGATGGGACGGATTGACCCCTACGACTCGGAAAC |
| | | CCATTACAACCAGAAGTTCAAGGATCACGTGACCATCTCCGTGG |
| | | ACAAGTCCATTTCCACTGCGTACCTCCAGTGGTCAAGCCTGAAG |
| | | GCCTCCGACACTGCTATGTACTACTGCGCACGCGGAAACTGGGA |
| | | TGATTACTGGGGACAGGGAACAACCGTGACTGTGTCCTCCACCA |
| | | CTACCCCAGCACCGAGGCCACCCACCCCGGCTCCTACCATCGCCT |
| | | CCCAGCCTCTGTCCCTGCGTCCGGAggcatgtagacccgcagctggtggggccgtg |
| | | catacccggggtcttgacttcgcctgcgatatctacatttgggcccctctggctggtacttgcggggtcctgct |
| | | gctttcactcgtgatcactctttactgtaagcgcggtcggaagaagctgctgtacatctttaagcaacccttcat |
| | | gaggcctgtgcagactactcaagaggaggacggctgttcatgccggttcccagaggaggaggaaggcgg |
| | | ctgcgaactgcgcgtgaaattcagccgcagcgcagatgctccagcctacaagcaggggcagaaccagct |
| | | ctacaacgaactcaatcttggtcggagagaggagtacgacgtgctggacaagcggagaggacgggaccc |
| | | agaaatgggcgggaagccgcgcagaaagaatccccaagagggcctgtacaacgagctccaaaaggata |
| | | agatggcagaagcctatagcgagattggtatgaaaggggaacgcagaagaggcaaaggccacgacgga |
| | | ctgtaccagggactcagcaccgccaccaaggacacctatgacgctcttcacatgcaggccctgccgcctcg |
| | | g |
| hzCAR123-22 | 2517 | MALPVTALLLPLALLLHAARPEVVLTQSPATLSLSPGERATLSCRAS |
| AA | | KSISKDLAWYQQK |
| | | PGQAPRLLIYSGSTLQSGIPARFSGSGSGTDFTLTISSLEPEDFAVYYC |
| | | QQHNKYPYTFG |
| | | GGTKVEIKGGGGSGGGGSGGGGSGGGGSEVQLVQSGAEVKKPGES |
| | | LRISCKGSGYTFTSY |
| | | WMNWVRQMPGKGLEWMGRIDPYDSETHYNQKFKDHVTISVDKSI |
| | | STAYLQWSSLKASDTA |
| | | MYYCARGNWDDYWGQGTTVTVSSTTTPAPRPPTPAPTIASQPLSLR |
| | | PEACRPAAGGAVHT |
| | | RGLDFACDIYIWAPLAGTCGVLLLSLVITLYCKRGRKKLLYIFKQPF |
| | | MRPVQTTQEEDGC |
| | | SCRFPEEEEGGCELRVKFSRSADAPAYKQGQNQLYNELNLGRREEY |
| | | DVLDKRRGRDPEMG |
| | | GKPRRKNPQEGLYNELQKDKMAEAYSEIGMKGERRRGKGHDGLY |
| | | QGLSTATKDTYDALHM |
| | | QALPPR |
| hzCAR123-22 | 2518 | MALPVTALLLPLALLLHAARPEVVLTQSPATLSLSPGERATLSCRAS |
| scFv | | KSISKDLAWYQQK |
| | | PGQAPRLLIYSGSTLQSGIPARFSGSGSGTDFTLTISSLEPEDFAVYYC |
| | | QQHNKYPYTFG |
| | | GGTKVEIKGGGGSGGGGSGGGGSGGGGSEVQLVQSGAEVKKPGES |
| | | LRISCKGSGYTFTSY |
| | | WMNWVRQMPGKGLEWMGRIDPYDSETHYNQKFKDHVTISVDKSI |
| | | STAYLQWSSLKASDTA |
| | | MYYCARGNWDDYWGQGTTVTVSS |
| hzCAR123-22 | 2503 | EVQLVQSGAEVKKPGESLRISCKGSGYTFTSYWMNWVRQMPGKGL |
| VH | | EWMGRIDPYDSETHYNQKFKDHVTISVDKSISTAYLQWSSLKASDT |
| | | AMYYCARGNWDDYWGQGTTVTVSS |
| hzCAR123-22 | 2454 | EVVLTQSPATLSLSPGERATLSCRASKSISKDLAWYQQKPGQAPRLL |
| VL | | IYSGSTLQSGIPARFSGSGSGTDFTLTISSLEPEDFAVYYCQQHNKYP |
| | | YTFGGGTKVEIK |
| hzCAR123-23 | 2519 | ATGGCCCTCCCTGTCACCGCCCTGCTGCTTCCGCTGGCTCTTCTG |
| NT | | CTCCACGCCGCTCGGCCCGACGTCGTGATGACCCAGTCACCGGC |
| | | ATTCCTGTCCGTGACTCCCGGAGAAAAGGTCACGATTACTTGCCG |
| | | GGCGTCCAAGAGCATCTCCAAGGACCTCGCCTGGTACCAACAGA |
| | | AGCCGGACCAGGCCCCTAAGCTGTTGATCTACTCGGGGTCCACC |
| | | CTTCAATCGGGAGTGCCATCGCGGTTTAGCGGTTCGGGTTCTGGG |
| | | ACCGACTTCACTTTCACCATCTCCTCACTGGAAGCCGAGGATGCC |
| | | GCCACTTACTACTGTCAGCAGCACAACAAGTATCCGTACACCTTC |
| | | GGAGGCGGTACCAAAGTGGAGATCAAGGGGGGTGGCGGTAGCG |
| | | GAGGAGGGGGCTCCGGCGGCGGCGGCTCAGGGGGCGGAGGAAG |
| | | CGAGGTGCAGCTGGTGCAGAGCGGAGCCGAGGTCAAGAAGCCT |
| | | GGAGAATCCCTGAGGATCAGCTGCAAAGGCAGCGGGTATACCTT |
| | | CACCTCCTACTGGATGAATTGGGTCCGCCAGATGCCCGGAAAAG |
| | | GCCTGGAGTGGATGGGACGGATTGACCCCTACGACTCGGAAACC |
| | | CATTACAACCAGAAGTTCAAGGATCACGTGACCATCTCCGTGGA |
| | | CAAGTCCATTTCCACTGCGTACCTCCAGTGGTCAAGCCTGAAGGC |
| | | CTCCGACACTGCTATGTACTACTGCGCACGCGGAAACTGGGATG |
| | | ATTACTGGGGACAGGGAACAACCGTGACTGTGTCCTCCACCACT |
| | | ACCCCAGCACCGAGGCCACCCACCCCGGCTCCTACCATCGCCTC |
| | | CCAGCCTCTGTCCCTGCGTCCGGAggcatgtagacccgcagctggtggggccgtgc |
| | | atacccggggtcttgacttcgcctgcgatatctacatttgggcccctctggctggtacttgcggggtcctgctg |
| | | ctttcactcgtgatcactctttactgtaagcgcggtcggaagaagctgctgtacatctttaagcaacccttcatg |
| | | aggcctgtgcagactactcaagaggaggacggctgttcatgccggttcccagaggaggaggaaggcggc |
| | | tgcgaactgcgcgtgaaattcagccgcagcgcagatgctccagcctacaagcaggggcagaaccagctct |
| | | acaacgaactcaatcttggtcggagagaggagtacgacgtgctggacaagcggagaggacgggaccca |
| | | gaaatgggcgggaagccgcgcagaaagaatccccaagagggcctgtacaacgagctccaaaaggataa |
| | | gatggcagaagcctatagcgagattggtatgaaaggggaacgcagaagaggcaaaggccacgacggac |
| | | tgtaccagggactcagcaccgccaccaaggacacctatgacgctcttcacatgcaggccctgccgcctcg |
| | | g |
| hzCAR123-23 | 2520 | MALPVTALLLPLALLLHAARPDVVMTQSPAFLSVTPGEKVTITCRAS |
| AA | | KSISKDLAWYQQK |
| | | PDQAPKLLIYSGSTLQSGVPSRFSGSGSGTDFTFTISSLEAEDAATYY |
| | | CQQHNKYPYTFG |
| | | GGTKVEIKGGGGSGGGGSGGGGSGGGGSEVQLVQSGAEVKKPGES |
| | | LRISCKGSGYTFTSY |
| | | WMNWVRQMPGKGLEWMGRIDPYDSETHYNQKFKDHVTISVDKSI |
| | | STAYLQWSSLKASDTA |
| | | MYYCARGNWDDYWGQGTTVTVSSTTTPAPRPPTPAPTIASQPLSLR |
| | | PEACRPAAGGAVHT |
| | | RGLDFACDIYIWAPLAGTCGVLLLSLVITLYCKRGRKKLLYIFKQPF |
| | | MRPVQTTQEEDGC |
| | | SCRFPEEEEGGCELRVKFSRSADAPAYKQGQNQLYNELNLGRREEY |
| | | DVLDKRRGRDPEMG |
| | | GKPRRKNPQEGLYNELQKDKMAEAYSEIGMKGERRRGKGHDGLY |
| | | QGLSTATKDTYDALHM |
| | | QALPPR |
| hzCAR123-23 | 2521 | MALPVTALLLPLALLLHAARPDVVMTQSPAFLSVTPGEKVTITCRAS |
| scFv | | KSISKDLAWYQQK |
| | | PDQAPKLLIYSGSTLQSGVPSRFSGSGSGTDFTFTISSLEAEDAATYY |
| | | CQQHNKYPYTFG |
| | | GGTKVEIKGGGGSGGGGSGGGGSGGGGSEVQLVQSGAEVKKPGES |
| | | LRISCKGSGYTFTSY |
| | | WMNWVRQMPGKGLEWMGRIDPYDSETHYNQKFKDHVTISVDKSI |
| | | STAYLQWSSLKASDTA |
| | | MYYCARGNWDDYWGQGTTVTVSS |
| hzCAR123-23 | 2503 | EVQLVQSGAEVKKPGESLRISCKGSGYTFTSYWMNWVRQMPGKGL |
| VH | | EWMGRIDPYDSETHYNQKFKDHVTISVDKSISTAYLQWSSLKASDT |
| | | AMYYCARGNWDDYWGQGTTVTVSS |
| hzCAR123-23 | 2458 | DVVMTQSPAFLSVTPGEKVTITCRASKSISKDLAWYQQKPDQAPKL |
| VL | | LIYSGSTLQSGVPSRFSGSGSGTDFTFTISSLEAEDAATYYCQQHNKY |
| | | PYTFGGGTKVEIK |
| hzCAR123-24 | 2522 | ATGGCCCTCCCTGTCACCGCCCTGCTGCTTCCGCTGGCTCTTCTG |
| NT | | CTCCACGCCGCTCGGCCCGACGTGGTCATGACTCAGTCCCCGGA |
| | | CTCACTCGCGGTGTCGCTTGGAGAGAGAGCGACCATCAACTGTC |
| | | GGGCCTCAAAGAGCATCAGCAAGGACCTGGCCTGGTACCAGCAG |
| | | AAGCCGGGACAGCCGCCAAAGCTGCTGATCTACTCCGGGTCCAC |
| | | CTTGCAATCTGGTGTCCCTGACCGGTTCTCCGGTTCCGGGTCGGG |
| | | TACCGACTTCACGCTCACTATTTCGTCGCTGCAAGCCGAAGATGT |
| | | GGCCGTGTACTATTGCCAACAGCACAACAAGTACCCCTACACTTT |
| | | TGGCGGAGGCACCAAGGTGGAAATCAAGGGGGGTGGCGGTAGC |
| | | GGAGGAGGGGGCTCCGGCGGCGGCGGCTCAGGGGGCGGAGGAA |
| | | GCGAGGTGCAGCTGGTGCAGAGCGGAGCCGAGGTCAAGAAGCC |
| | | TGGAGAATCCCTGAGGATCAGCTGCAAAGGCAGCGGGTATACCT |
| | | TCACCTCCTACTGGATGAATTGGGTCCGCCAGATGCCCGGAAAA |
| | | GGCCTGGAGTGGATGGGACGGATTGACCCCTACGACTCGGAAAC |
| | | CCATTACAACCAGAAGTTCAAGGATCACGTGACCATCTCCGTGG |
| | | ACAAGTCCATTTCCACTGCGTACCTCCAGTGGTCAAGCCTGAAG |
| | | GCCTCCGACACTGCTATGTACTACTGCGCACGCGGAAACTGGGA |
| | | TGATTACTGGGGACAGGGAACAACCGTGACTGTGTCCTCCACCA |
| | | CTACCCCAGCACCGAGGCCACCCACCCCGGCTCCTACCATCGCCT |
| | | CCCAGCCTCTGTCCCTGCGTCCGGAggcatgtagacccgcagctggtggggccgtg |
| | | catacccggggtcttgacttcgcctgcgatatctacatttgggcccctctggctggtacttgcggggtcctgct |
| | | gctttcactcgtgatcactctttactgtaagcgcggtcggaagaagctgctgtacatctttaagcaacccttcat |
| | | gaggcctgtgcagactactcaagaggaggacggctgttcatgccggttcccagaggaggaggaaggcgg |
| | | ctgcgaactgcgcgtgaaattcagccgcagcgcagatgctccagcctacaagcaggggcagaaccagct |
| | | ctacaacgaactcaatcttggtcggagagaggagtacgacgtgctggacaagcggagaggacgggaccc |
| | | agaaatgggcgggaagccgcgcagaaagaatccccaagagggcctgtacaacgagctccaaaaggata |
| | | agatggcagaagcctatagcgagattggtatgaaaggggaacgcagaagaggcaaaggccacgacgga |
| | | ctgtaccagggactcagcaccgccaccaaggacacctatgacgctcttcacatgcaggccctgccgcctcg |
| | | g |
| hzCAR123-24 | 2523 | MALPVTALLLPLALLLHAARPDVVMTQSPDSLAVSLGERATINCRA |
| AA | | SKSISKDLAWYQQK |
| | | PGQPPKLLIYSGSTLQSGVPDRFSGSGSGTDFTLTISSLQAEDVAVYY |
| | | CQQHNKYPYTFG |
| | | GGTKVEIKGGGGSGGGGSGGGGSGGGGSEVQLVQSGAEVKKPGES |
| | | LRISCKGSGYTFTSY |
| | | WMNWVRQMPGKGLEWMGRIDPYDSETHYNQKFKDHVTISVDKSI |
| | | STAYLQWSSLKASDTA |
| | | MYYCARGNWDDYWGQGTTVTVSSTTTPAPRPPTPAPTIASQPLSLR |
| | | PEACRPAAGGAVHT |
| | | RGLDFACDIYIWAPLAGTCGVLLLSLVITLYCKRGRKKLLYIFKQPF |
| | | MRPVQTTQEEDGC |
| | | SCRFPEEEEGGCELRVKFSRSADAPAYKQGQNQLYNELNLGRREEY |
| | | DVLDKRRGRDPEMG |
| | | GKPRRKNPQEGLYNELQKDKMAEAYSEIGMKGERRRGKGHDGLY |
| | | QGLSTATKDTYDALHM |
| | | QALPPR |
| hzCAR123-24 | 2524 | MALPVTALLLPLALLLHAARPDVVMTQSPDSLAVSLGERATINCRA |
| scFv | | SKSISKDLAWYQQK |
| | | PGQPPKLLIYSGSTLQSGVPDRFSGSGSGTDFTLTISSLQAEDVAVYY |
| | | CQQHNKYPYTFG |
| | | GGTKVEIKGGGGSGGGGSGGGGSGGGGSEVQLVQSGAEVKKPGES |
| | | LRISCKGSGYTFTSY |
| | | WMNWVRQMPGKGLEWMGRIDPYDSETHYNQKFKDHVTISVDKSI |
| | | STAYLQWSSLKASDTA |
| | | MYYCARGNWDDYWGQGTTVTVSS |
| hzCAR123-24 | 2503 | EVQLVQSGAEVKKPGESLRISCKGSGYTFTSYWMNWVRQMPGKGL |
| VH | | EWMGRIDPYDSETHYNQKFKDHVTISVDKSISTAYLQWSSLKASDT |
| | | AMYYCARGNWDDYWGQGTTVTVSS |
| hzCAR123-24 | 2462 | DVVMTQSPDSLAVSLGERATINCRASKSISKDLAWYQQKPGQPPKL |
| VL | | LIYSGSTLQSGVPDRFSGSGSGTDFTLTISSLQAEDVAVYYCQQHNK |
| | | YPYTFGGGTKVEIK |
| hzCAR123-25 | 2525 | ATGGCCCTCCCTGTCACCGCCCTGCTGCTTCCGCTGGCTCTTCTG |
| NT | | CTCCACGCCGCTCGGCCCGAAGTGCAGCTCGTCGAGAGCGGAGG |
| | | GGGACTGGTGCAGCCCGGAGGAAGCCTGAGGCTGTCCTGCGCTG |
| | | CCTCCGGCTACACCTTCACCTCCTACTGGATGAACTGGGTCAGAC |
| | | AGGCACCTGGAAAGGGACTGGTCTGGGTGTCGCGCATTGACCCC |
| | | TACGACTCCGAAACCCATTACAATCAGAAATTCAAGGACCGCTT |
| | | CACCATCTCCGTGGACAAAGCCAAGAGCACCGCGTACCTCCAAA |
| | | TGAACTCCCTGCGCGCTGAGGATACAGCAGTGTACTATTGCGCC |
| | | CGGGGAAACTGGGATGATTACTGGGGCCAGGGAACTACTGTGAC |
| | | TGTGTCATCCGGGGGTGGCGGTAGCGGAGGAGGGGGCTCCGGCG |
| | | GCGGCGGCTCAGGGGGCGGAGGAAGCGACGTGCAGCTCACCCA |
| | | GTCGCCCTCATTTCTGTCGGCCTCAGTGGGAGACAGAGTGACCAT |
| | | TACTTGTCGGGCCTCCAAGAGCATCTCCAAGGACCTGGCCTGGT |
| | | ATCAGCAGAAGCCAGGAAAGGCGCCTAAGTTGCTCATCTACTCG |
| | | GGGTCGACCCTGCAATCTGGCGTGCCGTCCCGGTTCTCCGGTTCG |
| | | GGAAGCGGTACCGAATTCACCCTTACTATCTCCTCCCTGCAACCG |
| | | GAGGACTTCGCCACCTACTACTGCCAACAGCACAACAAGTACCC |
| | | GTACACTTTCGGGGGTGGCACGAAGGTCGAAATCAAGACCACTA |
| | | CCCCAGCACCGAGGCCACCCACCCCGGCTCCTACCATCGCCTCCC |
| | | AGCCTCTGTCCCTGCGTCCGGAggcatgtagacccgcagctggtggggccgtgcata |
| | | cccggggtcttgacttcgcctgcgatatctacatttgggcccctctggctggtacttgcggggtcctgctgcttt |
| | | cactcgtgatcactctttactgtaagcgcggtcggaagaagctgctgtacatctttaagcaacccttcatgagg |
| | | cctgtgcagactactcaagaggaggacggctgttcatgccggttcccagaggaggaggaaggcggctgc |
| | | gaactgcgcgtgaaattcagccgcagcgcagatgctccagcctacaagcaggggcagaaccagctctac |
| | | aacgaactcaatcttggtcggagagaggagtacgacgtgctggacaagcggagaggacgggacccaga |
| | | aatgggcgggaagccgcgcagaaagaatccccaagagggcctgtacaacgagctccaaaaggataaga |
| | | tggcagaagcctatagcgagattggtatgaaaggggaacgcagaagaggcaaaggccacgacggactgt |
| | | accagggactcagcaccgccaccaaggacacctatgacgctcttcacatgcaggccctgccgcctcgg |
| hzCAR123-25 | 2526 | MALPVTALLLPLALLLHAARPEVQLVESGGGLVQPGGSLRLSCAAS |
| AA | | GYTFTSYWMNWVRQ |
| | | APGKGLVWVSRIDPYDSETHYNQKFKDRFTISVDKAKSTAYLQMNS |
| | | LRAEDTAVYYCARG |
| | | NWDDYWGQGTTVTVSSGGGGSGGGGSGGGGSGGGGSDVQLTQSP |
| | | SFLSASVGDRVTITCR |
| | | ASKSISKDLAWYQQKPGKAPKLLIYSGSTLQSGVPSRFSGSGSGTEF |
| | | TLTISSLQPEDFA |
| | | TYYCQQHNKYPYTFGGGTKVEIKTTTPAPRPPTPAPTIASQPLSLRPE |
| | | ACRPAAGGAVHT |
| | | RGLDFACDIYIWAPLAGTCGVLLLSLVITLYCKRGRKKLLYIFKQPF |
| | | MRPVQTTQEEDGC |
| | | SCRFPEEEEGGCELRVKFSRSADAPAYKQGQNQLYNELNLGRREEY |
| | | DVLDKRRGRDPEMG |
| | | GKPRRKNPQEGLYNELQKDKMAEAYSEIGMKGERRRGKGHDGLY |
| | | QGLSTATKDTYDALHM |
| | | QALPPR |
| hzCAR123-25 | 2527 | MALPVTALLLPLALLLHAARPEVQLVESGGGLVQPGGSLRLSCAAS |
| scFv | | GYTFTSYWMNWVRQ |
| | | APGKGLVWVSRIDPYDSETHYNQKFKDRFTISVDKAKSTAYLQMNS |
| | | LRAEDTAVYYCARG |
| | | NWDDYWGQGTTVTVSSGGGGSGGGGSGGGGSGGGGSDVQLTQSP |
| | | SFLSASVGDRVTITCR |
| | | ASKSISKDLAWYQQKPGKAPKLLIYSGSTLQSGVPSRFSGSGSGTEF |
| | | TLTISSLQPEDFA |
| | | TYYCQQHNKYPYTFGGGTKVEIK |
| hzCAR123-25 | 2528 | EVQLVESGGGLVQPGGSLRLSCAASGYTFTSYWMNWVRQAPGKG |
| VH | | LVWVSRIDPYDSETHYNQKFKDRFTISVDKAKSTAYLQMNSLRAED |
| | | TAVYYCARGNWDDYWGQGTTVTVSS |
| hzCAR123-25 | 2450 | DVQLTQSPSFLSASVGDRVTITCRASKSISKDLAWYQQKPGKAPKLL |
| VL | | IYSGSTLQSGVPSRFSGSGSGTEFTLTISSLQPEDFATYYCQQHNKYP |
| | | YTFGGGTKVEIK |
| hzCAR123-26 | 2529 | ATGGCCCTCCCTGTCACCGCCCTGCTGCTTCCGCTGGCTCTTCTG |
| NT | | CTCCACGCCGCTCGGCCCGAAGTGCAGCTCGTCGAGAGCGGAGG |
| | | GGGACTGGTGCAGCCCGGAGGAAGCCTGAGGCTGTCCTGCGCTG |
| | | CCTCCGGCTACACCTTCACCTCCTACTGGATGAACTGGGTCAGAC |
| | | AGGCACCTGGAAAGGGACTGGTCTGGGTGTCGCGCATTGACCCC |
| | | TACGACTCCGAAACCCATTACAATCAGAAATTCAAGGACCGCTT |
| | | CACCATCTCCGTGGACAAAGCCAAGAGCACCGCGTACCTCCAAA |
| | | TGAACTCCCTGCGCGCTGAGGATACAGCAGTGTACTATTGCGCC |
| | | CGGGGAAACTGGGATGATTACTGGGGCCAGGGAACTACTGTGAC |
| | | TGTGTCATCCGGGGGTGGCGGTAGCGGAGGAGGGGGCTCCGGCG |
| | | GCGGCGGCTCAGGGGGCGGAGGAAGCGAAGTGGTGCTGACCCA |
| | | GTCGCCCGCAACCCTCTCTCTGTCGCCGGGAGAACGCGCCACTCT |
| | | TTCCTGTCGGGCGTCCAAGAGCATCTCAAAGGACCTCGCCTGGT |
| | | ACCAGCAGAAGCCTGGTCAAGCCCCGCGGCTGCTGATCTACTCC |
| | | GGCTCCACGCTGCAATCAGGAATCCCAGCCAGATTTTCCGGTTCG |
| | | GGGTCGGGGACTGACTTCACCTTGACCATTAGCTCGCTGGAACCT |
| | | GAGGACTTCGCCGTGTATTACTGCCAGCAGCACAACAAGTACCC |
| | | GTACACCTTCGGAGGCGGTACTAAGGTCGAGATCAAGACCACTA |
| | | CCCCAGCACCGAGGCCACCCACCCCGGCTCCTACCATCGCCTCCC |
| | | AGCCTCTGTCCCTGCGTCCGGAggcatgtagacccgcagctggtggggccgtgcata |
| | | cccggggtcttgacttcgcctgcgatatctacatttgggcccctctggctggtacttgcggggtcctgctgcttt |
| | | cactcgtgatcactctttactgtaagcgcggtcggaagaagctgctgtacatctttaagcaacccttcatgagg |
| | | cctgtgcagactactcaagaggaggacggctgttcatgccggttcccagaggaggaggaaggcggctgc |
| | | gaactgcgcgtgaaattcagccgcagcgcagatgctccagcctacaagcaggggcagaaccagctctac |
| | | aacgaactcaatcttggtcggagagaggagtacgacgtgctggacaagcggagaggacgggacccaga |
| | | aatgggcgggaagccgcgcagaaagaatccccaagagggcctgtacaacgagctccaaaaggataaga |
| | | tggcagaagcctatagcgagattggtatgaaaggggaacgcagaagaggcaaaggccacgacggactgt |
| | | accagggactcagcaccgccaccaaggacacctatgacgctcttcacatgcaggccctgccgcctcgg |
| hzCAR123-26 | 2530 | MALPVTALLLPLALLLHAARPEVQLVESGGGLVQPGGSLRLSCAAS |
| AA | | GYTFTSYWMNWVRQ |
| | | APGKGLVWVSRIDPYDSETHYNQKFKDRFTISVDKAKSTAYLQMNS |
| | | LRAEDTAVYYCARG |
| | | NWDDYWGQGTTVTVSSGGGGSGGGGSGGGGSGGGGSEVVLTQSP |
| | | ATLSLSPGERATLSCR |
| | | ASKSISKDLAWYQQKPGQAPRLLIYSGSTLQSGIPARFSGSGSGTDFT |
| | | LTISSLEPEDFA |
| | | VYYCQQHNKYPYTFGGGTKVEIKTTTPAPRPPTPAPTIASQPLSLRPE |
| | | ACRPAAGGAVHT |
| | | RGLDFACDIYIWAPLAGTCGVLLLSLVITLYCKRGRKKLLYIFKQPF |
| | | MRPVQTTQEEDGC |
| | | SCRFPEEEEGGCELRVKFSRSADAPAYKQGQNQLYNELNLGRREEY |
| | | DVLDKRRGRDPEMG |
| | | GKPRRKNPQEGLYNELQKDKMAEAYSEIGMKGERRRGKGHDGLY |
| | | QGLSTATKDTYDALHM |
| | | QALPPR |
| hzCAR123-26 | 2531 | MALPVTALLLPLALLLHAARPEVQLVESGGGLVQPGGSLRLSCAAS |
| scFv | | GYTFTSYWMNWVRQ |
| | | APGKGLVWVSRIDPYDSETHYNQKFKDRFTISVDKAKSTAYLQMNS |
| | | LRAEDTAVYYCARG |
| | | NWDDYWGQGTTVTVSSGGGGSGGGGSGGGGSGGGGSEVVLTQSP |
| | | ATLSLSPGERATLSCR |
| | | ASKSISKDLAWYQQKPGQAPRLLIYSGSTLQSGIPARFSGSGSGTDFT |
| | | LTISSLEPEDFA |
| | | VYYCQQHNKYPYTFGGGTKVEIK |
| hzCAR123-26 | 2528 | EVQLVESGGGLVQPGGSLRLSCAASGYTFTSYWMNWVRQAPGKG |
| VH | | LVWVSRIDPYDSETHYNQKFKDRFTISVDKAKSTAYLQMNSLRAED |
| | | TAVYYCARGNWDDYWGQGTTVTVSS |
| hzCAR123-26 | 2454 | EVVLTQSPATLSLSPGERATLSCRASKSISKDLAWYQQKPGQAPRLL |
| VL | | IYSGSTLQSGIPARFSGSGSGTDFTLTISSLEPEDFAVYYCQQHNKYP |
| | | YTFGGGTKVEIK |
| hzCAR123-27 | 2532 | ATGGCCCTCCCTGTCACCGCCCTGCTGCTTCCGCTGGCTCTTCTG |
| NT | | CTCCACGCCGCTCGGCCCGAAGTGCAGCTCGTCGAGAGCGGAGG |
| | | GGGACTGGTGCAGCCCGGAGGAAGCCTGAGGCTGTCCTGCGCTG |
| | | CCTCCGGCTACACCTTCACCTCCTACTGGATGAACTGGGTCAGAC |
| | | AGGCACCTGGAAAGGGACTGGTCTGGGTGTCGCGCATTGACCCC |
| | | TACGACTCCGAAACCCATTACAATCAGAAATTCAAGGACCGCTT |
| | | CACCATCTCCGTGGACAAAGCCAAGAGCACCGCGTACCTCCAAA |
| | | TGAACTCCCTGCGCGCTGAGGATACAGCAGTGTACTATTGCGCC |
| | | CGGGGAAACTGGGATGATTACTGGGGCCAGGGAACTACTGTGAC |
| | | TGTGTCATCCGGGGGTGGCGGTAGCGGAGGAGGGGGCTCCGGCG |
| | | GCGGCGGCTCAGGGGGCGGAGGAAGCGACGTCGTGATGACCCA |
| | | GTCACCGGCATTCCTGTCCGTGACTCCCGGAGAAAAGGTCACGA |
| | | TTACTTGCCGGGCGTCCAAGAGCATCTCCAAGGACCTCGCCTGGT |
| | | ACCAACAGAAGCCGGACCAGGCCCCTAAGCTGTTGATCTACTCG |
| | | GGGTCCACCCTTCAATCGGGAGTGCCATCGCGGTTTAGCGGTTCG |
| | | GGTTCTGGGACCGACTTCACTTTCACCATCTCCTCACTGGAAGCC |
| | | GAGGATGCCGCCACTTACTACTGTCAGCAGCACAACAAGTATCC |
| | | GTACACCTTCGGAGGCGGTACCAAAGTGGAGATCAAGACCACTA |
| | | CCCCAGCACCGAGGCCACCCACCCCGGCTCCTACCATCGCCTCCC |
| | | AGCCTCTGTCCCTGCGTCCGGAggcatgtagacccgcagctggtggggccgtgcata |
| | | cccggggtcttgacttcgcctgcgatatctacatttgggcccctctggctggtacttgcggggtcctgctgcttt |
| | | cactcgtgatcactctttactgtaagcgcggtcggaagaagctgctgtacatctttaagcaacccttcatgagg |
| | | cctgtgcagactactcaagaggaggacggctgttcatgccggttcccagaggaggaggaaggcggctgc |
| | | gaactgcgcgtgaaattcagccgcagcgcagatgctccagcctacaagcaggggcagaaccagctctac |
| | | aacgaactcaatcttggtcggagagaggagtacgacgtgctggacaagcggagaggacgggacccaga |
| | | aatgggcgggaagccgcgcagaaagaatccccaagagggcctgtacaacgagctccaaaaggataaga |
| | | tggcagaagcctatagcgagattggtatgaaaggggaacgcagaagaggcaaaggccacgacggactgt |
| | | accagggactcagcaccgccaccaaggacacctatgacgctcttcacatgcaggccctgccgcctcgg |
| hzCAR123-27 | 2533 | MALPVTALLLPLALLLHAARPEVQLVESGGGLVQPGGSLRLSCAAS |
| AA | | GYTFTSYWMNWVRQ |
| | | APGKGLVWVSRIDPYDSETHYNQKFKDRFTISVDKAKSTAYLQMNS |
| | | LRAEDTAVYYCARG |
| | | NWDDYWGQGTTVTVSSGGGGSGGGGSGGGGSGGGGSDVVMTQS |
| | | PAFLSVTPGEKVTITCR |
| | | ASKSISKDLAWYQQKPDQAPKLLIYSGSTLQSGVPSRFSGSGSGTDF |
| | | TFTISSLEAEDAA |
| | | TYYCQQHNKYPYTFGGGTKVEIKTTTPAPRPPTPAPTIASQPLSLRPE |
| | | ACRPAAGGAVHT |
| | | RGLDFACDIYIWAPLAGTCGVLLLSLVITLYCKRGRKKLLYIFKQPF |
| | | MRPVQTTQEEDGC |
| | | SCRFPEEEEGGCELRVKFSRSADAPAYKQGQNQLYNELNLGRREEY |
| | | DVLDKRRGRDPEMG |
| | | GKPRRKNPQEGLYNELQKDKMAEAYSEIGMKGERRRGKGHDGLY |
| | | QGLSTATKDTYDALHM |
| | | QALPPR |
| hzCAR123-27 | 2534 | MALPVTALLLPLALLLHAARPEVQLVESGGGLVQPGGSLRLSCAAS |
| scFv | | GYTFTSYWMNWVRQ |
| | | APGKGLVWVSRIDPYDSETHYNQKFKDRFTISVDKAKSTAYLQMNS |
| | | LRAEDTAVYYCARG |
| | | NWDDYWGQGTTVTVSSGGGGSGGGGSGGGGSGGGGSDVVMTQS |
| | | PAFLSVTPGEKVTITCR |
| | | ASKSISKDLAWYQQKPDQAPKLLIYSGSTLQSGVPSRFSGSGSGTDF |
| | | TFTISSLEAEDAA |
| | | TYYCQQHNKYPYTFGGGTKVEIK |
| hzCAR123-27 | 2528 | EVQLVESGGGLVQPGGSLRLSCAASGYTFTSYWMNWVRQAPGKG |
| VH | | LVWVSRIDPYDSETHYNQKFKDRFTISVDKAKSTAYLQMNSLRAED |
| | | TAVYYCARGNWDDYWGQGTTVTVSS |
| hzCAR123-27 | 2458 | DVVMTQSPAFLSVTPGEKVTITCRASKSISKDLAWYQQKPDQAPKL |
| VL | | LIYSGSTLQSGVPSRFSGSGSGTDFTFTISSLEAEDAATYYCQQHNKY |
| | | PYTFGGGTKVEIK |
| hzCAR123-28 | 2535 | ATGGCCCTCCCTGTCACCGCCCTGCTGCTTCCGCTGGCTCTTCTG |
| NT | | CTCCACGCCGCTCGGCCCGAAGTGCAGCTCGTCGAGAGCGGAGG |
| | | GGGACTGGTGCAGCCCGGAGGAAGCCTGAGGCTGTCCTGCGCTG |
| | | CCTCCGGCTACACCTTCACCTCCTACTGGATGAACTGGGTCAGAC |
| | | AGGCACCTGGAAAGGGACTGGTCTGGGTGTCGCGCATTGACCCC |
| | | TACGACTCCGAAACCCATTACAATCAGAAATTCAAGGACCGCTT |
| | | CACCATCTCCGTGGACAAAGCCAAGAGCACCGCGTACCTCCAAA |
| | | TGAACTCCCTGCGCGCTGAGGATACAGCAGTGTACTATTGCGCC |
| | | CGGGGAAACTGGGATGATTACTGGGGCCAGGGAACTACTGTGAC |
| | | TGTGTCATCCGGGGGTGGCGGTAGCGGAGGAGGGGGCTCCGGCG |
| | | GCGGCGGCTCAGGGGGCGGAGGAAGCGACGTGGTCATGACTCA |
| | | GTCCCCGGACTCACTCGCGGTGTCGCTTGGAGAGAGAGCGACCA |
| | | TCAACTGTCGGGCCTCAAAGAGCATCAGCAAGGACCTGGCCTGG |
| | | TACCAGCAGAAGCCGGGACAGCCGCCAAAGCTGCTGATCTACTC |
| | | CGGGTCCACCTTGCAATCTGGTGTCCCTGACCGGTTCTCCGGTTC |
| | | CGGGTCGGGTACCGACTTCACGCTCACTATTTCGTCGCTGCAAGC |
| | | CGAAGATGTGGCCGTGTACTATTGCCAACAGCACAACAAGTACC |
| | | CCTACACTTTTGGCGGAGGCACCAAGGTGGAAATCAAGACCACT |
| | | ACCCCAGCACCGAGGCCACCCACCCCGGCTCCTACCATCGCCTC |
| | | CCAGCCTCTGTCCCTGCGTCCGGAggcatgtagacccgcagctggtggggccgtgc |
| | | atacccggggtcttgacttcgcctgcgatatctacatttgggcccctctggctggtacttgcggggtcctgctg |
| | | ctttcactcgtgatcactctttactgtaagcgcggtcggaagaagctgctgtacatctttaagcaacccttcatg |
| | | aggcctgtgcagactactcaagaggaggacggctgttcatgccggttcccagaggaggaggaaggcggc |
| | | tgcgaactgcgcgtgaaattcagccgcagcgcagatgctccagcctacaagcaggggcagaaccagctct |
| | | acaacgaactcaatcttggtcggagagaggagtacgacgtgctggacaagcggagaggacgggaccca |
| | | gaaatgggcgggaagccgcgcagaaagaatccccaagagggcctgtacaacgagctccaaaaggataa |
| | | gatggcagaagcctatagcgagattggtatgaaaggggaacgcagaagaggcaaaggccacgacggac |
| | | tgtaccagggactcagcaccgccaccaaggacacctatgacgctcttcacatgcaggccctgccgcctcg |
| | | g |
| hzCAR123-28 | 2536 | MALPVTALLLPLALLLHAARPEVQLVESGGGLVQPGGSLRLSCAAS |
| AA | | GYTFTSYWMNWVRQ |
| | | APGKGLVWVSRIDPYDSETHYNQKFKDRFTISVDKAKSTAYLQMNS |
| | | LRAEDTAVYYCARG |
| | | NWDDYWGQGTTVTVSSGGGGSGGGGSGGGGSGGGGSDVVMTQS |
| | | PDSLAVSLGERATINCR |
| | | ASKSISKDLAWYQQKPGQPPKLLIYSGSTLQSGVPDRFSGSGSGTDF |
| | | TLTISSLQAEDVA |
| | | VYYCQQHNKYPYTFGGGTKVEIKTTTPAPRPPTPAPTIASQPLSLRPE |
| | | ACRPAAGGAVHT |
| | | RGLDFACDIYIWAPLAGTCGVLLLSLVITLYCKRGRKKLLYIFKQPF |
| | | MRPVQTTQEEDGC |
| | | SCRFPEEEEGGCELRVKFSRSADAPAYKQGQNQLYNELNLGRREEY |
| | | DVLDKRRGRDPEMG |
| | | GKPRRKNPQEGLYNELQKDKMAEAYSEIGMKGERRRGKGHDGLY |
| | | QGLSTATKDTYDALHM |
| | | QALPPR |
| hzCAR123-28 | 2537 | MALPVTALLLPLALLLHAARPEVQLVESGGGLVQPGGSLRLSCAAS |
| scFv | | GYTFTSYWMNWVRQ |
| | | APGKGLVWVSR1DPYDSETHYNQKFKDRFTISVDKAKSTAYLQMNS |
| | | LRAEDTAVYYCARG |
| | | NWDDYWGQGTTVTVSSGGGGSGGGGSGGGGSGGGGSDVVMTQS |
| | | PDSLAVSLGERATINCR |
| | | ASKSISKDLAWYQQKPGQPPKLLIYSGSTLQSGVPDRFSGSGSGTDF |
| | | TLTISSLQAEDVA |
| | | VYYCQQHNKYPYTFGGGTKVEIK |
| hzCAR123-28 | 2528 | EVQLVESGGGLVQPGGSLRLSCAASGYTFTSYWMNWVRQAPGKG |
| VH | | LVWVSRIDPYDSETHYNQKFKDRFTISVDKAKSTAYLQMNSLRAED |
| | | TAVYYCARGNWDDYWGQGTTVTVSS |
| hzCAR123-28 | 2462 | DVVMTQSPDSLAVSLGERATINCRASKSISKDLAWYQQKPGQPPKL |
| VL | | LIYSGSTLQSGVPDRFSGSGSGTDFTLTISSLQAEDVAVYYCQQHNK |
| | | YPYTFGGGTKVEIK |
| hzCAR123-29 | 2538 | ATGGCCCTCCCTGTCACCGCCCTGCTGCTTCCGCTGGCTCTTCTG |
| NT | | CTCCACGCCGCTCGGCCCGACGTGCAGCTCACCCAGTCGCCCTCA |
| | | TTTCTGTCGGCCTCAGTGGGAGACAGAGTGACCATTACTTGTCGG |
| | | GCCTCCAAGAGCATCTCCAAGGACCTGGCCTGGTATCAGCAGAA |
| | | GCCAGGAAAGGCGCCTAAGTTGCTCATCTACTCGGGGTCGACCC |
| | | TGCAATCTGGCGTGCCGTCCCGGTTCTCCGGTTCGGGAAGCGGTA |
| | | CCGAATTCACCCTTACTATCTCCTCCCTGCAACCGGAGGACTTCG |
| | | CCACCTACTACTGCCAACAGCACAACAAGTACCCGTACACTTTC |
| | | GGGGGTGGCACGAAGGTCGAAATCAAGGGGGGTGGCGGTAGCG |
| | | GAGGAGGGGGCTCCGGCGGCGGCGGCTCAGGGGGCGGAGGAAG |
| | | CGAAGTGCAGCTCGTCGAGAGCGGAGGGGGACTGGTGCAGCCC |
| | | GGAGGAAGCCTGAGGCTGTCCTGCGCTGCCTCCGGCTACACCTT |
| | | CACCTCCTACTGGATGAACTGGGTCAGACAGGCACCTGGAAAGG |
| | | GACTGGTCTGGGTGTCGCGCATTGACCCCTACGACTCCGAAACC |
| | | CATTACAATCAGAAATTCAAGGACCGCTTCACCATCTCCGTGGA |
| | | CAAAGCCAAGAGCACCGCGTACCTCCAAATGAACTCCCTGCGCG |
| | | CTGAGGATACAGCAGTGTACTATTGCGCCCGGGGAAACTGGGAT |
| | | GATTACTGGGGCCAGGGAACTACTGTGACTGTGTCATCCACCAC |
| | | TACCCCAGCACCGAGGCCACCCACCCCGGCTCCTACCATCGCCTC |
| | | CCAGCCTCTGTCCCTGCGTCCGGAggcatgtagacccgcagctggtggggccgtgc |
| | | atacccggggtcttgacttcgcctgcgatatctacatttgggcccctctggctggtacttgcggggtcctgctg |
| | | ctttcactcgtgatcactctttactgtaagcgcggtcggaagaagctgctgtacatctttaagcaacccttcatg |
| | | aggcctgtgcagactactcaagaggaggacggctgttcatgccggttcccagaggaggaggaaggcggc |
| | | tgcgaactgcgcgtgaaattcagccgcagcgcagatgctccagcctacaagcaggggcagaaccagctct |
| | | acaacgaactcaatcttggtcggagagaggagtacgacgtgctggacaagcggagaggacgggaccca |
| | | gaaatgggcgggaagccgcgcagaaagaatccccaagagggcctgtacaacgagctccaaaaggataa |
| | | gatggcagaagcctatagcgagattggtatgaaaggggaacgcagaagaggcaaaggccacgacggac |
| | | tgtaccagggactcagcaccgccaccaaggacacctatgacgctcttcacatgcaggccctgccgcctcg |
| | | g |
| hzCAR123-29 | 2539 | MALPVTALLLPLALLLHAARPDVQLTQSPSFLSASVGDRVTITCRAS |
| AA | | KSISKDLAWYQQK |
| | | PGKAPKLLIYSGSTLQSGVPSRFSGSGSGTEFTLTISSLQPEDFATYYC |
| | | QQHNKYPYTFG |
| | | GGTKVEIKGGGGSGGGGSGGGGSGGGGSEVQLVESGGGLVQPGGS |
| | | LRLSCAASGYTFTSY |
| | | WMNWVRQAPGKGLVWVSRIDPYDSETHYNQKFKDRFTISVDKAK |
| | | STAYLQMNSLRAEDTA |
| | | VYYCARGNWDDYWGQGTTVTVSSTTTPAPRPPTPAPTIASQPLSLR |
| | | PEACRPAAGGAVHT |
| | | RGLDFACDIYIWAPLAGTCGVLLLSLVITLYCKRGRKKLLYIFKQPF |
| | | MRPVQTTQEEDGC |
| | | SCRFPEEEEGGCELRVKFSRSADAPAYKQGQNQLYNELNLGRREEY |
| | | DVLDKRRGRDPEMG |
| | | GKPRRKNPQEGLYNELQKDKMAEAYSEIGMKGERRRGKGHDGLY |
| | | QGLSTATKDTYDALHM |
| | | QALPPR |
| hzCAR123-29 | 2540 | MALPVTALLLPLALLLHAARPDVQLTQSPSFLSASVGDRVTITCRAS |
| scFv | | KSISKDLAWYQQK |
| | | PGKAPKLLIYSGSTLQSGVPSRFSGSGSGTEFTLTISSLQPEDFATYYC |
| | | QQHNKYPYTFG |
| | | GGTKVEIKGGGGSGGGGSGGGGSGGGGSEVQLVESGGGLVQPGGS |
| | | LRLSCAASGYTFTSY |
| | | WMNWVRQAPGKGLVWVSRIDPYDSETHYNQKFKDRFTISVDKAK |
| | | STAYLQMNSLRAEDTA |
| | | VYYCARGNWDDYWGQGTTVTVSS |
| hzCAR123-29 | 2528 | EVQLVESGGGLVQPGGSLRLSCAASGYTFTSYWMNWVRQAPGKG |
| VH | | LVWVSRIDPYDSETHYNQKFKDRFTISVDKAKSTAYLQMNSLRAED |
| | | TAVYYCARGNWDDYWGQGTTVTVSS |
| hzCAR123-29 | 2450 | DVQLTQSPSFLSASVGDRVTITCRASKSISKDLAWYQQKPGKAPKLL |
| VL | | IYSGSTLQSGVPSRFSGSGSGTEFTLTISSLQPEDFATYYCQQHNKYP |
| | | YTFGGGTKVEIK |
| hzCAR123-30 | 2541 | ATGGCCCTCCCTGTCACCGCCCTGCTGCTTCCGCTGGCTCTTCTG |
| NT | | CTCCACGCCGCTCGGCCCGAAGTGGTGCTGACCCAGTCGCCCGC |
| | | AACCCTCTCTCTGTCGCCGGGAGAACGCGCCACTCTTTCCTGTCG |
| | | GGCGTCCAAGAGCATCTCAAAGGACCTCGCCTGGTACCAGCAGA |
| | | AGCCTGGTCAAGCCCCGCGGCTGCTGATCTACTCCGGCTCCACGC |
| | | TGCAATCAGGAATCCCAGCCAGATTTTCCGGTTCGGGGTCGGGG |
| | | ACTGACTTCACCTTGACCATTAGCTCGCTGGAACCTGAGGACTTC |
| | | GCCGTGTATTACTGCCAGCAGCACAACAAGTACCCGTACACCTT |
| | | CGGAGGCGGTACTAAGGTCGAGATCAAGGGGGGTGGCGGTAGC |
| | | GGAGGAGGGGGCTCCGGCGGCGGCGGCTCAGGGGGCGGAGGAA |
| | | GCGAAGTGCAGCTCGTCGAGAGCGGAGGGGGACTGGTGCAGCC |
| | | CGGAGGAAGCCTGAGGCTGTCCTGCGCTGCCTCCGGCTACACCT |
| | | TCACCTCCTACTGGATGAACTGGGTCAGACAGGCACCTGGAAAG |
| | | GGACTGGTCTGGGTGTCGCGCATTGACCCCTACGACTCCGAAAC |
| | | CCATTACAATCAGAAATTCAAGGACCGCTTCACCATCTCCGTGG |
| | | ACAAAGCCAAGAGCACCGCGTACCTCCAAATGAACTCCCTGCGC |
| | | GCTGAGGATACAGCAGTGTACTATTGCGCCCGGGGAAACTGGGA |
| | | TGATTACTGGGGCCAGGGAACTACTGTGACTGTGTCATCCACCA |
| | | CTACCCCAGCACCGAGGCCACCCACCCCGGCTCCTACCATCGCCT |
| | | CCCAGCCTCTGTCCCTGCGTCCGGAggcatgtagacccgcagctggtggggccgtg |
| | | catacccggggtcttgacttcgcctgcgatatctacatttgggcccctctggctggtacttgcggggtcctgct |
| | | gctttcactcgtgatcactctttactgtaagcgcggtcggaagaagctgctgtacatctttaagcaacccttcat |
| | | gaggcctgtgcagactactcaagaggaggacggctgttcatgccggttcccagaggaggaggaaggcgg |
| | | ctgcgaactgcgcgtgaaattcagccgcagcgcagatgctccagcctacaagcaggggcagaaccagct |
| | | ctacaacgaactcaatcttggtcggagagaggagtacgacgtgctggacaagcggagaggacgggaccc |
| | | agaaatgggcgggaagccgcgcagaaagaatccccaagagggcctgtacaacgagctccaaaaggata |
| | | agatggcagaagcctatagcgagattggtatgaaaggggaacgcagaagaggcaaaggccacgacgga |
| | | ctgtaccagggactcagcaccgccaccaaggacacctatgacgctcttcacatgcaggccctgccgcctcg |
| | | g |
| hzCAR123-30 | 2542 | MALPVTALLLPLALLLHAARPEVVLTQSPATLSLSPGERATLSCRAS |
| AA | | KSISKDLAWYQQK |
| | | PGQAPRLLIYSGSTLQSGIPARFSGSGSGTDFTLTISSLEPEDFAVYYC |
| | | QQHNKYPYTFG |
| | | GGTKVEIKGGGGSGGGGSGGGGSGGGGSEVQLVESGGGLVQPGGS |
| | | LRLSCAASGYTFTSY |
| | | WMNWVRQAPGKGLVWVSRIDPYDSETHYNQKFKDRFTISVDKAK |
| | | STAYLQMNSLRAEDTA |
| | | VYYCARGNWDDYWGQGTTVTVSSTTTPAPRPPTPAPTIASQPLSLR |
| | | PEACRPAAGGAVHT |
| | | RGLDFACDIYIWAPLAGTCGVLLLSLVITLYCKRGRKKLLYIFKQPF |
| | | MRPVQTTQEEDGC |
| | | SCRFPEEEEGGCELRVKFSRSADAPAYKQGQNQLYNELNLGRREEY |
| | | DVLDKRRGRDPEMG |
| | | GKPRRKNPQEGLYNELQKDKMAEAYSEIGMKGERRRGKGHDGLY |
| | | QGLSTATKDTYDALHM |
| | | QALPPR |
| hzCAR123-30 | 2543 | MALPVTALLLPLALLLHAARPEVVLTQSPATLSLSPGERATLSCRAS |
| scFv | | KSISKDLAWYQQK |
| | | PGQAPRLLIYSGSTLQSGIPARFSGSGSGTDFTLTISSLEPEDFAVYYC |
| | | QQHNKYPYTFG |
| | | GGTKVEIKGGGGSGGGGSGGGGSGGGGSEVQLVESGGGLVQPGGS |
| | | LRLSCAASGYTFTSY |
| | | WMNWVRQAPGKGLVWVSRIDPYDSETHYNQKFKDRFTISVDKAK |
| | | STAYLQMNSLRAEDTA |
| | | VYYCARGNWDDYWGQGTTVTVSS |
| hzCAR123-30 | 2528 | EVQLVESGGGLVQPGGSLRLSCAASGYTFTSYWMNWVRQAPGKG |
| VH | | LVWVSRIDPYDSETHYNQKFKDRFTISVDKAKSTAYLQMNSLRAED |
| | | TAVYYCARGNWDDYWGQGTTVTVSS |
| hzCAR123-30 | 2454 | EVVLTQSPATLSLSPGERATLSCRASKSISKDLAWYQQKPGQAPRLL |
| VL | | IYSGSTLQSGIPARFSGSGSGTDFTLTISSLEPEDFAVYYCQQHNKYP |
| | | YTFGGGTKVEIK |
| hzCAR123-31 | 2544 | ATGGCCCTCCCTGTCACCGCCCTGCTGCTTCCGCTGGCTCTTCTG |
| NT | | CTCCACGCCGCTCGGCCCGACGTCGTGATGACCCAGTCACCGGC |
| | | ATTCCTGTCCGTGACTCCCGGAGAAAAGGTCACGATTACTTGCCG |
| | | GGCGTCCAAGAGCATCTCCAAGGACCTCGCCTGGTACCAACAGA |
| | | AGCCGGACCAGGCCCCTAAGCTGTTGATCTACTCGGGGTCCACC |
| | | CTTCAATCGGGAGTGCCATCGCGGTTTAGCGGTTCGGGTTCTGGG |
| | | ACCGACTTCACTTTCACCATCTCCTCACTGGAAGCCGAGGATGCC |
| | | GCCACTTACTACTGTCAGCAGCACAACAAGTATCCGTACACCTTC |
| | | GGAGGCGGTACCAAAGTGGAGATCAAGGGGGGTGGCGGTAGCG |
| | | GAGGAGGGGGCTCCGGCGGCGGCGGCTCAGGGGGCGGAGGAAG |
| | | CGAAGTGCAGCTCGTCGAGAGCGGAGGGGGACTGGTGCAGCCC |
| | | GGAGGAAGCCTGAGGCTGTCCTGCGCTGCCTCCGGCTACACCTT |
| | | CACCTCCTACTGGATGAACTGGGTCAGACAGGCACCTGGAAAGG |
| | | GACTGGTCTGGGTGTCGCGCATTGACCCCTACGACTCCGAAACC |
| | | CATTACAATCAGAAATTCAAGGACCGCTTCACCATCTCCGTGGA |
| | | CAAAGCCAAGAGCACCGCGTACCTCCAAATGAACTCCCTGCGCG |
| | | CTGAGGATACAGCAGTGTACTATTGCGCCCGGGGAAACTGGGAT |
| | | GATTACTGGGGCCAGGGAACTACTGTGACTGTGTCATCCACCAC |
| | | TACCCCAGCACCGAGGCCACCCACCCCGGCTCCTACCATCGCCTC |
| | | CCAGCCTCTGTCCCTGCGTCCGGAggcatgtagacccgcagctggtggggccgtgc |
| | | atacccggggtcttgacttcgcctgcgatatctacatttgggcccctctggctggtacttgcggggtcctgctg |
| | | ctttcactcgtgatcactctttactgtaagcgcggtcggaagaagctgctgtacatctttaagcaacccttcatg |
| | | aggcctgtgcagactactcaagaggaggacggctgttcatgccggttcccagaggaggaggaaggcggc |
| | | tgcgaactgcgcgtgaaattcagccgcagcgcagatgctccagcctacaagcaggggcagaaccagctct |
| | | acaacgaactcaatcttggtcggagagaggagtacgacgtgctggacaagcggagaggacgggaccca |
| | | gaaatgggcgggaagccgcgcagaaagaatccccaagagggcctgtacaacgagctccaaaaggataa |
| | | gatggcagaagcctatagcgagattggtatgaaaggggaacgcagaagaggcaaaggccacgacggac |
| | | tgtaccagggactcagcaccgccaccaaggacacctatgacgctcttcacatgcaggccctgccgcctcg |
| | | g |
| hzCAR123-31 | 2545 | MALPVTALLLPLALLLHAARPDVVMTQSPAFLSVTPGEKVTITCRAS |
| AA | | KSISKDLAWYQQK |
| | | PDQAPKLLIYSGSTLQSGVPSRFSGSGSGTDFTFTISSLEAEDAATYY |
| | | CQQHNKYPYTFG |
| | | GGTKVEIKGGGGSGGGGSGGGGSGGGGSEVQLVESGGGLVQPGGS |
| | | LRLSCAASGYTFTSY |
| | | WMNWVRQAPGKGLVWVSRIDPYDSETHYNQKFKDRFTISVDKAK |
| | | STAYLQMNSLRAEDTA |
| | | VYYCARGNWDDYWGQGTTVTVSSTTTPAPRPPTPAPTIASQPLSLR |
| | | PEACRPAAGGAVHT |
| | | RGLDFACDIYIWAPLAGTCGVLLLSLVITLYCKRGRKKLLYIFKQPF |
| | | MRPVQTTQEEDGC |
| | | SCRFPEEEEGGCELRVKFSRSADAPAYKQGQNQLYNELNLGRREEY |
| | | DVLDKRRGRDPEMG |
| | | GKPRRKNPQEGLYNELQKDKMAEAYSEIGMKGERRRGKGHDGLY |
| | | QGLSTATKDTYDALHM |
| | | QALPPR |
| hzCAR123-31 | 2546 | MALPVTALLLPLALLLHAARPDVVMTQSPAFLSVTPGEKVTITCRAS |
| scFv | | KSISKDLAWYQQK |
| | | PDQAPKLLIYSGSTLQSGVPSRFSGSGSGTDFTFTISSLEAEDAATYY |
| | | CQQHNKYPYTFG |
| | | GGTKVEIKGGGGSGGGGSGGGGSGGGGSEVQLVESGGGLVQPGGS |
| | | LRLSCAASGYTFTSY |
| | | WMNWVRQAPGKGLVWVSRIDPYDSETHYNQKFKDRFTISVDKAK |
| | | STAYLQMNSLRAEDTA |
| | | VYYCARGNWDDYWGQGTTVTVSS |
| hzCAR123-31 | 2528 | EVQLVESGGGLVQPGGSLRLSCAASGYTFTSYWMNWVRQAPGKG |
| VH | | LVWVSRIDPYDSETHYNQKFKDRFTISVDKAKSTAYLQMNSLRAED |
| | | TAVYYCARGNWDDYWGQGTTVTVSS |
| hzCAR123-31 | 2458 | DVVMTQSPAFLSVTPGEKVTITCRASKSISKDLAWYQQKPDQAPKL |
| VL | | LIYSGSTLQSGVPSRFSGSGSGTDFTFTISSLEAEDAATYYCQQHNKY |
| | | PYTFGGGTKVEIK |
| hzCAR123-32 | 2547 | ATGGCCCTCCCTGTCACCGCCCTGCTGCTTCCGCTGGCTCTTCTG |
| NT | | CTCCACGCCGCTCGGCCCGACGTGGTCATGACTCAGTCCCCGGA |
| | | CTCACTCGCGGTGTCGCTTGGAGAGAGAGCGACCATCAACTGTC |
| | | GGGCCTCAAAGAGCATCAGCAAGGACCTGGCCTGGTACCAGCAG |
| | | AAGCCGGGACAGCCGCCAAAGCTGCTGATCTACTCCGGGTCCAC |
| | | CTTGCAATCTGGTGTCCCTGACCGGTTCTCCGGTTCCGGGTCGGG |
| | | TACCGACTTCACGCTCACTATTTCGTCGCTGCAAGCCGAAGATGT |
| | | GGCCGTGTACTATTGCCAACAGCACAACAAGTACCCCTACACTTT |
| | | TGGCGGAGGCACCAAGGTGGAAATCAAGGGGGGTGGCGGTAGC |
| | | GGAGGAGGGGGCTCCGGCGGCGGCGGCTCAGGGGGCGGAGGAA |
| | | GCGAAGTGCAGCTCGTCGAGAGCGGAGGGGGACTGGTGCAGCC |
| | | CGGAGGAAGCCTGAGGCTGTCCTGCGCTGCCTCCGGCTACACCT |
| | | TCACCTCCTACTGGATGAACTGGGTCAGACAGGCACCTGGAAAG |
| | | GGACTGGTCTGGGTGTCGCGCATTGACCCCTACGACTCCGAAAC |
| | | CCATTACAATCAGAAATTCAAGGACCGCTTCACCATCTCCGTGG |
| | | ACAAAGCCAAGAGCACCGCGTACCTCCAAATGAACTCCCTGCGC |
| | | GCTGAGGATACAGCAGTGTACTATTGCGCCCGGGGAAACTGGGA |
| | | TGATTACTGGGGCCAGGGAACTACTGTGACTGTGTCATCCACCA |
| | | CTACCCCAGCACCGAGGCCACCCACCCCGGCTCCTACCATCGCCT |
| | | CCCAGCCTCTGTCCCTGCGTCCGGAggcatgtagacccgcagctggtggggccgtg |
| | | catacccggggtcttgacttcgcctgcgatatctacatttgggcccctctggctggtacttgcggggtcctgct |
| | | gctttcactcgtgatcactctttactgtaagcgcggtcggaagaagctgctgtacatctttaagcaacccttcat |
| | | gaggcctgtgcagactactcaagaggaggacggctgttcatgccggttcccagaggaggaggaaggcgg |
| | | ctgcgaactgcgcgtgaaattcagccgcagcgcagatgctccagcctacaagcaggggcagaaccagct |
| | | ctacaacgaactcaatcttggtcggagagaggagtacgacgtgctggacaagcggagaggacgggaccc |
| | | agaaatgggcgggaagccgcgcagaaagaatccccaagagggcctgtacaacgagctccaaaaggata |
| | | agatggcagaagcctatagcgagattggtatgaaaggggaacgcagaagaggcaaaggccacgacgga |
| | | ctgtaccagggactcagcaccgccaccaaggacacctatgacgctcttcacatgcaggccctgccgcctcg |
| | | g |
| hzCAR123-32 | 2548 | MALPVTALLLPLALLLHAARPDVVMTQSPDSLAVSLGERATINCRA |
| AA | | SKSISKDLAWYQQK |
| | | PGQPPKLLIYSGSTLQSGVPDRFSGSGSGTDFTLTISSLQAEDVAVYY |
| | | CQQHNKYPYTFG |
| | | GGTKVEIKGGGGSGGGGSGGGGSGGGGSEVQLVESGGGLVQPGGS |
| | | LRLSCAASGYTFTSY |
| | | WMNWVRQAPGKGLVWVSRIDPYDSETHYNQKFKDRFTISVDKAK |
| | | STAYLQMNSLRAEDTA |
| | | VYYCARGNWDDYWGQGTTVTVSSTTTPAPRPPTPAPTIASQPLSLR |
| | | PEACRPAAGGAVHT |
| | | RGLDFACDIYIWAPLAGTCGVLLLSLVITLYCKRGRKKLLYIFKQPF |
| | | MRPVQTTQEEDGC |
| | | SCRFPEEEEGGCELRVKFSRSADAPAYKQGQNQLYNELNLGRREEY |
| | | DVLDKRRGRDPEMG |
| | | GKPRRKNPQEGLYNELQKDKMAEAYSEIGMKGERRRGKGHDGLY |
| | | QGLSTATKDTYDALHM |
| | | QALPPR |
| hzCAR123-32 | 2549 | MALPVTALLLPLALLLHAARPDVVMTQSPDSLAVSLGERATINCRA |
| scFv | | SKSISKDLAWYQQK |
| | | PGQPPKLLIYSGSTLQSGVPDRFSGSGSGTDFTLTISSLQAEDVAVYY |
| | | CQQHNKYPYTFG |
| | | GGTKVEIKGGGGSGGGGSGGGGSGGGGSEVQLVESGGGLVQPGGS |
| | | LRLSCAASGYTFTSY |
| | | WMNWVRQAPGKGLVWVSRIDPYDSETHYNQKFKDRFTISVDKAK |
| | | STAYLQMNSLRAEDTA |
| | | VYYCARGNWDDYWGQGTTVTVSS |
| hzCAR123-32 | 2528 | EVQLVESGGGLVQPGGSLRLSCAASGYTFTSYWMNWVRQAPGKG |
| VH | | LVWVSRIDPYDSETHYNQKFKDRFTISVDKAKSTAYLQMNSLRAED |
| | | TAVYYCARGNWDDYWGQGTTVTVSS |
| hzCAR123-32 | 2462 | DVVMTQSPDSLAVSLGERATINCRASKSISKDLAWYQQKPGQPPKL |
| VL | | LIYSGSTLQSGVPDRFSGSGSGTDFTLTISSLQAEDVAVYYCQQHNK |
| | | YPYTFGGGTKVEIK |

[0427] In embodiments, a CAR molecule described herein comprises a scFv that specifically binds to CD123, and does not contain a leader sequence, e.g., the amino acid sequence SEQ ID NO: 1015. Table 14 below provides amino acid and nucleotide sequences for CD123 scFv sequences that do not contain a leader sequence SEQ ID NO: 1015.

TABLE 28
CD123 CAR scFv sequences

| | SEQ | |
|---|---|---|
| Name | ID | Sequence |
| CAR123-2 | 2550 | CAAGTGCAACTCGTCCAAAGCGGAGCGGAAGTCAAGAAACCCG |
| scFv - | | GAGCGAGCGTGAAAGTGTCCTGCAAAGCCTCCGGCTACACCTTT |
| NT | | ACGGGCTACTACATGCACTGGGTGCGCCAGGCACCAGGACAGG |
| | | GTCTTGAATGGATGGGATGGATCAACCCTAATTCGGGCGGAACT |
| | | AACTACGCACAGAAGTTCCAGGGGAGAGTGACTCTGACTCGGG |
| | | ATACCTCCATCTCAACTGTCTACATGGAACTCTCCCGCTTGCGGT |
| | | CAGATGATACGGCAGTGTACTACTGCGCCCGCGACATGAATATC |
| | | CTGGCTACCGTGCCGTTCGACATCTGGGGACAGGGGACTATGGT |
| | | TACTGTCTCATCGGGCGGTGGAGGTTCAGGAGGAGGCGGCTCG |
| | | GGAGGCGGAGGTTCGGACATTCAGATGACCCAGTCCCCATCCTC |
| | | TCTGTCGGCCAGCGTCGGAGATAGGGTGACCATTACCTGTCGGG |
| | | CCTCGCAAAGCATCTCCTCGTACCTCAACTGGTATCAGCAAAAG |
| | | CCGGGAAAGGCGCCTAAGCTGCTGATCTACGCCGCTTCGAGCTT |
| | | GCAAAGCGGGGTGCCATCCAGATTCTCGGGATCAGGCTCAGGA |
| | | ACCGACTTCACCCTGACCGTGAACAGCCTCCAGCCGGAGGACTT |
| | | TGCCACTTACTACTGCCAGCAGGGAGACTCCGTGCCGCTTACTT |
| | | TCGGGGGGGGTACCCGCCTGGAGATCAAG |
| CAR123-2 | 2551 | QVQLVQSGAEVKKPGASVKVSCKASGYTFTGYYMHWVRQAPGQ |
| scFv - | | GLEWMGWINPNSGGTNYAQKFQGRVTLTRDTSISTVYMELSRLRS |
| AA | | DDTAVYYCARDMNILATVPFDIWGQGTMVTVSSGGGGSGGGGSG |
| | | GGGSDIQMTQSPSSLSASVGDRVTITCRASQSISSYLNWYQQKPGK |
| | | APKLLIYAASSLQSGVPSRFSGSGSGTDFTLTVNSLQPEDFATYYCQ |
| | | QGDSVPLTFGGGTRLEIK |
| CAR123-2 | 2552 | atggccctccctgtcaccgccctgctgcttccgctggctcttctgctccacgccgctcggccccaagtgcaa |
| ORF- | | ctcgtccaaagcggagcggaagtcaagaaacccggagcgagcgtgaaagtgtcctgcaaagcctccgg |
| free | | ctacacctttacgggctactacatgcactgggtgcgccaggcaccaggacagggtcttgaatggatggga |
| NT | | tggatcaaccctaattcgggcggaactaactacgcacagaagttccaggggagagtgactctgactcggg |
| | | atacctccatctcaactgtctacatggaactctcccgcttgcggtcagatgatacggcagtgtactactgcgc |
| | | ccgcgacatgaatatcctggctaccgtgccgttcgacatctggggacaggggactatggttactgtctcatc |
| | | gggcggtggaggttcaggaggaggcggctcgggaggcggaggttcggacattcagatgacccagtcc |
| | | ccatcctctctgtcggccagcgtcggagatagggtgaccattacctgtcgggcctcgcaaagcatctcctc |
| | | gtacctcaactggtatcagcaaaagccgggaaaggcgcctaagctgctgatctacgccgcttcgagcttg |
| | | caaagcggggtgccatccagattctcgggatcaggctcaggaaccgacttcaccctgaccgtgaacagc |
| | | ctccagccggaggactttgccacttactactgccagcagggagactccgtgccgcttactttcggggggg |
| | | gtacccgcctggagatcaagaccactaccccagcaccgaggccacccaccccggctcctaccatcgcct |
| | | cccagcctctgtccctgcgtccggaggcatgtagacccgcagctggtggggccgtgcatacccggggtc |
| | | ttgacttcgcctgcgatatctacatttgggcccctctggctggtacttgcggggtcctgctgctttcactcgtg |
| | | atcactctttactgtaagcgcggtcggaagaagctgctgtacatctttaagcaacccttcatgaggcctgtgc |
| | | agactactcaagaggaggacggctgttcttgccggttcccagaggaggaggaaggcggctgcgaactg |
| | | cgcgtgaaattcagccgcagcgcagacgctccagcctacaagcaggggcagaaccagctctacaacga |
| | | actcaatcttggtcggagagaggagtacgacgtgctggacaagcggagaggacgggacccagaaatgg |
| | | gcgggaagccgcgcagaaagaatccccaagagggcctgtacaacgagctccaaaaggataagatggc |
| | | agaagcctatagcgagattggtatgaaaggggaacgcagaagaggcaaaggccacgacggactgtacc |
| | | agggactcagcaccgccaccaaggacacctatgacgctcttcacatgcaggccctgccgcctcggtaagt |
| | | cgacagctcgctttcttgctgtccaatttctattaaaggttcctttgttccctaagtccaactactaaactggggg |
| | | atattatgaagggccttgagcatctggattctgcctaataaaaaacatttattttcattgctgcgtcgagagctc |
| | | gctttcttgctgtccaatttctattaaaggttcctttgttccctaagtccaactactaaactgggggatattatgaa |
| | | gggccttgagcatctggattctgcctaataaaaaacatttattttcattgctgcctcgacgaattc |
| CAR123-3 | 2553 | CAAGTCCAACTCGTTCAATCCGGCGCAGAAGTCAAGAAGCCAG |
| scFv - | | GAGCATCAGTGAAAGTGTCCTGCAAAGCCTCAGGCTACATCTTC |
| NT | | ACGGGATACTACATCCACTGGGTGCGCCAGGCTCCGGGCCAGG |
| | | GCCTTGAGTGGATGGGCTGGATCAACCCTAACTCTGGGGGAACC |
| | | AACTACGCTCAGAAGTTCCAGGGGAGGGTCACTATGACTCGCG |
| | | ATACCTCCATCTCCACTGCGTACATGGAACTCTCGGGACTGAGA |
| | | TCCGACGATCCTGCCGTGTACTACTGCGCCCGGGACATGAACAT |
| | | CTTGGCGACCGTGCCGTTTGACATTTGGGGACAGGGCACCCTCG |
| | | TCACTGTGTCGAGCGGTGGAGGAGGCTCGGGGGGTGGCGGATC |
| | | AGGAGGGGGAGGAAGCGACATCCAGCTGACTCAGAGCCCATCG |
| | | TCGTTGTCCGCGTCGGTGGGGGATAGAGTGACCATTACTTGCCG |
| | | CGCCAGCCAGAGCATCTCATCATATCTGAATTGGTACCAGCAGA |
| | | AGCCCGGAAAGGCCCCAAAACTGCTGATCTACGCTGCAAGCAG |
| | | CCTCCAATCGGGAGTGCCGTCACGGTTCTCCGGGTCCGGTTCGG |
| | | GAACTGACTTTACCCTGACCGTGAATTCGCTGCAACCGGAGGAT |
| | | TTCGCCACGTACTACTGTCAGCAAGGAGACTCCGTGCCGCTGAC |
| | | CTTCGGTGGAGGCACCAAGGTCGAAATCAAG |
| CAR123-3 | 2554 | QVQLVQSGAEVKKPGASVKVSCKASGYIFTGYYIHWVRQAPGQGL |
| scFv - | | EWMGWINPNSGGTNYAQKFQGRVTMTRDTSISTAYMELSGLRSD |
| AA | | DPAVYYCARDMNILATVPFDIWGQGTLVTVSSGGGGSGGGGSGG |
| | | GGSDIQLTQSPSSLSASVGDRVTITCRASQSISSYLNWYQQKPGKAP |
| | | KLLIYAASSLQSGVPSRFSGSGSGTDFTLTVNSLQPEDFATYYCQQG |
| | | DSVPLTFGGGTKVEIK |
| CAR123-4 | 2555 | CAAGTCCAACTCCAACAGTCAGGCGCAGAAGTGAAAAAGAGCG |
| scFv - | | GTGCATCGGTGAAAGTGTCATGCAAAGCCTCGGGCTACACCTTC |
| NT | | ACTGACTACTATATGCACTGGCTGCGGCAGGCACCGGGACAGG |
| | | GACTTGAGTGGATGGGATGGATCAACCCGAATTCAGGGGACAC |
| | | TAACTACGCGCAGAAGTTCCAGGGGAGAGTGACCCTGACGAGG |
| | | GACACCTCAATTTCGACCGTCTACATGGAATTGTCGCGCCTGAG |
| | | ATCGGACGATACTGCTGTGTACTACTGTGCCCGCGACATGAACA |
| | | TCCTCGCGACTGTGCCTTTTGATATCTGGGGACAGGGGACTATG |
| | | GTCACCGTTTCCTCCGCTTCCGGTGGCGGAGGCTCGGGAGGCCG |
| | | GGCCTCCGGTGGAGGAGGCAGCGACATCCAGATGACTCAGAGC |
| | | CCTTCCTCGCTGAGCGCCTCAGTGGGAGATCGCGTGACCATCAC |
| | | TTGCCGGGCCAGCCAGTCCATTTCGTCCTACCTCAATTGGTACC |
| | | AGCAGAAGCCGGGAAAGGCGCCCAAGCTCTTGATCTACGCTGC |
| | | GAGCTCCCTGCAAAGCGGGGTGCCGAGCCGATTCTCGGGTTCCG |
| | | GCTCGGGAACCGACTTCACTCTGACCATCTCATCCCTGCAACCA |
| | | GAGGACTTTGCCACCTACTACTGCCAACAAGGAGATTCTGTCCC |
| | | ACTGACGTTCGGCGGAGGAACCAAGGTCGAAATCAAG |
| CAR123-4 | 2556 | QVQLQQSGAEVKKSGASVKVSCKASGYTFTDYYMHWLRQAPGQ |
| scFv - | | GLEWMGWINPNSGDTNYAQKFQGRVTLTRDTSISTVYMELSRLRS |
| AA | | DDTAVYYCARDMNILATVPFDIWGQGTMVTVSSASGGGGSGGRA |
| | | SGGGGSDIQMTQSPSSLSASVGDRVTITCRASQSISSYLNWYQQKP |
| | | GKAPKLLIYAASSLQSGVPSRFSGSGSGTDFTLTISSLQPEDFATYYC |
| | | QQGDSVPLTFGGGTKVEIK |
| CAR123-1 | 2557 | QVQLVQSGAEVKKPGASVKVSCKASGYTFTGYYMHWVRQAPGQ |
| scFv - | | GLEWMGWINPNSGGTNYAQKFQGRVTMTRDTSISTAYMELSRLRS |
| AA | | DDTAVYYCARDMNILATVPFDIWGQGTMVTVSSGGGGSGGGGSG |
| | | GGGSDIQMTQSPSSLSASVGDRVTITCRASQSISTYLNWYQQKPGK |
| | | APNLLIYAAFSLQSGVPSRFSGSGSGTDFTLTINSLQPEDFATYYCQ |
| | | QGDSVPLTFGGGTKLEIK |
| hzCAR123-1 | 2558 | QVQLVQSGAEVKKPGASVKVSCKASGYTFTSYWMNWVRQAPGQ |
| scFv | | GLEWMGRIDPYDSETHYNQKFKDRVTMTVDKSTSTAYMELSSLRS |
| | | EDTAVYYCARGNWDDYWGQGTTVTVSSGGGGSGGGGSGGGGSG |
| | | GGGSDVQLTQSPSFLSASVGDRVTITCRASKSISKDLAWYQQKPGK |
| | | APKLLIYSGSTLQSGVPSRFSGSGSGTEFTLTISSLQPEDFATYYCQQ |
| | | HNKYPYTFGGGTKVEIK |
| hzCAR123-2 | 2559 | QVQLVQSGAEVKKPGASVKVSCKASGYTFTSYWMNWVRQ |
| scFv | | APGQGLEWMGRIDPYDSETHYNQKFKDRVTMTVDKSTSTAYMEL |
| | | SSLRSEDTAVYYCARG |
| | | NWDDYWGQGTTVTVSSGGGGSGGGGSGGGGSGGGGSEVVLTQSP |
| | | ATLSLSPGERATLSCR |
| | | ASKSISKDLAWYQQKPGQAPRLLIYSGSTLQSGIPARFSGSGSGTDF |
| | | TLTISSLEPEDFA |
| | | VYYCQQHNKYPYTFGGGTKVEIK |
| hzCAR123-3 | 2560 | QVQLVQSGAEVKKPGASVKVSCKASGYTFTSYWMNWVRQ |
| scFv | | APGQGLEWMGRIDPYDSETHYNQKFKDRVTMTVDKSTSTAYMEL |
| | | SSLRSEDTAVYYCARG |
| | | NWDDYWGQGTTVTVSSGGGGSGGGGSGGGGSGGGGSDVVMTQS |
| | | PAFLSVTPGEKVTITCR |
| | | ASKSISKDLAWYQQKPDQAPKLLIYSGSTLQSGVPSRFSGSGSGTDF |
| | | TFTISSLEAEDAA |
| | | TYYCQQHNKYPYTFGGGTKVEIK |
| hzCAR123-4 | 2561 | QVQLVQSGAEVKKPGASVKVSCKASGYTFTSYWMNWVRQ |
| scFv | | APGQGLEWMGRIDPYDSETHYNQKFKDRVTMTVDKSTSTAYMEL |
| | | SSLRSEDTAVYYCARG |
| | | NWDDYWGQGTTVTVSSGGGGSGGGGSGGGGSGGGGSDVVMTQS |
| | | PDSLAVSLGERATINCR |
| | | ASKSISKDLAWYQQKPGQPPKLLIYSGSTLQSGVPDRFSGSGSGTDF |
| | | TLTISSLQAEDVA |
| | | VYYCQQHNKYPYTFGGGTKVEIK |
| hzCAR123-5 | 2562 | DVQLTQSPSFLSASVGDRVTITCRASKSISKDLAWYQQK |
| scFv | | PGKAPKLLIYSGSTLQSGVPSRFSGSGSGTEFTLTISSLQPEDFATYY |
| | | CQQHNKYPYTFG |
| | | GGTKVEIKGGGGSGGGGSGGGGSGGGGSQVQLVQSGAEVKKPGA |
| | | SVKVSCKASGYTFTSY |
| | | WMNWVRQAPGQGLEWMGRIDPYDSETHYNQKFKDRVTMTVDKS |
| | | TSTAYMELSSLRSEDTA |
| | | VYYCARGNWDDYWGQGTTVTVSS |
| hzCAR123-6 | 2563 | EVVLTQSPATLSLSPGERATLSCRASKSISKDLAWYQQK |
| scFv | | PGQAPRLLIYSGSTLQSGIPARFSGSGSGTDFTLTISSLEPEDFAVYY |
| | | CQQHNKYPYTFG |
| | | GGTKVEIKGGGGSGGGGSGGGGSGGGGSQVQLVQSGAEVKKPGA |
| | | SVKVSCKASGYTFTSY |
| | | WMNWVRQAPGQGLEWMGRIDPYDSETHYNQKFKDRVTMTVDKS |
| | | TSTAYMELSSLRSEDTA |
| | | VYYCARGNWDDYWGQGTTVTVSS |
| hzCAR123-7 | 2564 | DVVMTQSPAFLSVTPGEKVTITCRASKSISKDLAWYQQK |
| scFv | | PDQAPKLLIYSGSTLQSGVPSRFSGSGSGTDFTFTISSLEAEDAATYY |
| | | CQQHNKYPYTFG |
| | | GGTKVEIKGGGGSGGGGSGGGGSGGGGSQVQLVQSGAEVKKPGA |
| | | SVKVSCKASGYTFTSY |
| | | WMNWVRQAPGQGLEWMGRIDPYDSETHYNQKFKDRVTMTVDKS |
| | | TSTAYMELSSLRSEDTA |
| | | VYYCARGNWDDYWGQGTTVTVSS |
| hzCAR123-8 | 2565 | DVVMTQSPDSLAVSLGERATINCRASKSISKDLAWYQQK |
| scFv | | PGQPPKLLIYSGSTLQSGVPDRFSGSGSGTDFTLTISSLQAEDVAVY |
| | | YCQQHNKYPYTFG |
| | | GGTKVEIKGGGGSGGGGSGGGGSGGGGSQVQLVQSGAEVKKPGA |
| | | SVKVSCKASGYTFTSY |
| | | WMNWVRQAPGQGLEWMGRIDPYDSETHYNQKFKDRVTMTVDKS |
| | | TSTAYMELSSLRSEDTA |
| | | VYYCARGNWDDYWGQGTTVTVSS |
| hzCAR123-9 | 2566 | QVQLVQSGSELKKPGASVKVSCKASGYTFTSYWMNWVRQ |
| scFv | | APGQGLEWMGRIDPYDSETHYNQKFKDRFVFSVDKSVSTAYLQIS |
| | | SLKAEDTAVYYCARG |
| | | NWDDYWGQGTTVTVSSGGGGSGGGGSGGGGSGGGGSDVQLTQS |
| | | PSFLSASVGDRVTITCR |
| | | ASKSISKDLAWYQQKPGKAPKLLIYSGSTLQSGVPSRFSGSGSGTEF |
| | | TLTISSLQPEDFA |
| | | TYYCQQHNKYPYTFGGGTKVEIK |
| hzCAR123-10 | 2567 | QVQLVQSGSELKKPGASVKVSCKASGYTFTSYWMNWVRQ |
| scFv | | APGQGLEWMGRIDPYDSETHYNQKFKDRFVFSVDKSVSTAYLQIS |
| | | SLKAEDTAVYYCARG |
| | | NWDDYWGQGTTVTVSSGGGGSGGGGSGGGGSGGGGSEVVLTQSP |
| | | ATLSLSPGERATLSCR |
| | | ASKSISKDLAWYQQKPGQAPRLLIYSGSTLQSGIPARFSGSGSGTDF |
| | | TLTISSLEPEDFA |
| | | VYYCQQHNKYPYTFGGGTKVEIK |
| hzCAR123-11 | 2568 | QVQLVQSGSELKKPGASVKVSCKASGYTFTSYWMNWVRQ |
| scFv | | APGQGLEWMGRIDPYDSETHYNQKFKDRFVFSVDKSVSTAYLQIS |
| | | SLKAEDTAVYYCARG |
| | | NWDDYWGQGTTVTVSSGGGGSGGGGSGGGGSGGGGSDVVMTQS |
| | | PAFLSVTPGEKVTITCR |
| | | ASKSISKDLAWYQQKPDQAPKLLIYSGSTLQSGVPSRFSGSGSGTDF |
| | | TFTISSLEAEDAA |
| | | TYYCQQHNKYPYTFGGGTKVEIK |
| hzCAR123-12 | 2569 | QVQLVQSGSELKKPGASVKVSCKASGYTFTSYWMNWVRQ |
| scFv | | APGQGLEWMGRIDPYDSETHYNQKFKDRFVFSVDKSVSTAYLQIS |
| | | SLKAEDTAVYYCARG |
| | | NWDDYWGQGTTVTVSSGGGGSGGGGSGGGGSGGGGSDVVMTQS |
| | | PDSLAVSLGERATINCR |
| | | ASKSISKDLAWYQQKPGQPPKLLIYSGSTLQSGVPDRFSGSGSGTDF |
| | | TLTISSLQAEDVA |
| | | VYYCQQHNKYPYTFGGGTKVEIK |
| hzCAR123-13 | 2570 | DVQLTQSPSFLSASVGDRVTITCRASKSISKDLAWYQQK |
| scFv | | PGKAPKLLIYSGSTLQSGVPSRFSGSGSGTEFTLTISSLQPEDFATYY |
| | | CQQHNKYPYTFG |
| | | GGTKVEIKGGGGSGGGGSGGGGSGGGGSQVQLVQSGSELKKPGAS |
| | | VKVSCKASGYTFTSY |
| | | WMNWVRQAPGQGLEWMGRIDPYDSETHYNQKFKDRFVFSVDKS |
| | | VSTAYLQISSLKAEDTA |
| | | VYYCARGNWDDYWGQGTTVTVSS |
| hzCAR123-14 | 2571 | EVVLTQSPATLSLSPGERATLSCRASKSISKDLAWYQQK |
| scFv | | PGQAPRLLIYSGSTLQSGIPARFSGSGSGTDFTLTISSLEPEDFAVYY |
| | | CQQHNKYPYTFG |
| | | GGTKVEIKGGGGSGGGGSGGGGSGGGGSQVQLVQSGSELKKPGAS |
| | | VKVSCKASGYTFTSY |
| | | WMNWVRQAPGQGLEWMGRIDPYDSETHYNQKFKDRFVFSVDKS |
| | | VSTAYLQISSLKAEDTA |
| | | VYYCARGNWDDYWGQGTTVTVSS |
| hzCAR123-15 | 2572 | DVVMTQSPAFLSVTPGEKVTITCRASKSISKDLAWYQQK |
| scFv | | PDQAPKLLIYSGSTLQSGVPSRFSGSGSGTDFTFTISSLEAEDAATYY |
| | | CQQHNKYPYTFG |
| | | GGTKVEIKGGGGSGGGGSGGGGSGGGGSQVQLVQSGSELKKPGAS |
| | | VKVSCKASGYTFTSY |
| | | WMNWVRQAPGQGLEWMGRIDPYDSETHYNQKFKDRFVFSVDKS |
| | | VSTAYLQISSLKAEDTA |
| | | VYYCARGNWDDYWGQGTTVTVSS |
| hzCAR123-16 | 2573 | DVVMTQSPDSLAVSLGERATINCRASKSISKDLAWYQQK |
| scFv | | PGQPPKLLIYSGSTLQSGVPDRFSGSGSGTDFTLTISSLQAEDVAVY |
| | | YCQQHNKYPYTFG |
| | | GGTKVEIKGGGGSGGGGSGGGGSGGGGSQVQLVQSGSELKKPGAS |
| | | VKVSCKASGYTFTSY |
| | | WMNWVRQAPGQGLEWMGRIDPYDSETHYNQKFKDRFVFSVDKS |
| | | VSTAYLQISSLKAEDTA |
| | | VYYCARGNWDDYWGQGTTVTVSS |
| hzCAR123-17 | 2574 | EVQLVQSGAEVKKPGESLRISCKGSGYTFTSYWMNWVRQ |
| scFv | | MPGKGLEWMGRIDPYDSETHYNQKFKDHVTISVDKSISTAYLQWS |
| | | SLKASDTAMYYCARG |
| | | NWDDYWGQGTTVTVSSGGGGSGGGGSGGGGSGGGGSDVQLTQS |
| | | PSFLSASVGDRVTITCR |
| | | ASKSISKDLAWYQQKPGKAPKLLIYSGSTLQSGVPSRFSGSGSGTEF |
| | | TLTISSLQPEDFA |
| | | TYYCQQHNKYPYTFGGGTKVEIK |
| hzCAR123-18 | 2575 | EVQLVQSGAEVKKPGESLRISCKGSGYTFTSYWMNWVRQ |
| scFv | | MPGKGLEWMGRIDPYDSETHYNQKFKDHVTISVDKSISTAYLQWS |
| | | SLKASDTAMYYCARG |
| | | NWDDYWGQGTTVTVSSGGGGSGGGGSGGGGSGGGGSEVVLTQSP |
| | | ATLSLSPGERATLSCR |
| | | ASKSISKDLAWYQQKPGQAPRLLIYSGSTLQSGIPARFSGSGSGTDF |
| | | TLTISSLEPEDFA |
| | | VYYCQQHNKYPYTFGGGTKVEIK |
| hzCAR123-19 | 2576 | EVQLVQSGAEVKKPGESLRISCKGSGYTFTSYWMNWVRQ |
| scFv | | MPGKGLEWMGRIDPYDSETHYNQKFKDHVTISVDKSISTAYLQWS |
| | | SLKASDTAMYYCARG |
| | | NWDDYWGQGTTVTVSSGGGGSGGGGSGGGGSGGGGSDVVMTQS |
| | | PAFLSVTPGEKVTITCR |
| | | ASKSISKDLAWYQQKPDQAPKLLIYSGSTLQSGVPSRFSGSGSGTDF |
| | | TFTISSLEAEDAA |
| | | TYYCQQHNKYPYTFGGGTKVEIK |
| hzCAR123-20 | 2577 | EVQLVQSGAEVKKPGESLRISCKGSGYTFTSYWMNWVRQ |
| scFv | | MPGKGLEWMGRIDPYDSETHYNQKFKDHVTISVDKSISTAYLQWS |
| | | SLKASDTAMYYCARG |
| | | NWDDYWGQGTTVTVSSGGGGSGGGGSGGGGSGGGGSDVVMTQS |
| | | PDSLAVSLGERATINCR |
| | | ASKSISKDLAWYQQKPGQPPKLLIYSGSTLQSGVPDRFSGSGSGTDF |
| | | TLTISSLQAEDVA |
| | | VYYCQQHNKYPYTFGGGTKVEIK |
| hzCAR123-21 | 2578 | DVQLTQSPSFLSASVGDRVTITCRASKSISKDLAWYQQK |
| scFv | | PGKAPKLLIYSGSTLQSGVPSRFSGSGSGTEFTLTISSLQPEDFATYY |
| | | CQQHNKYPYTFG |
| | | GGTKVEIKGGGGSGGGGSGGGGSGGGGSEVQLVQSGAEVKKPGE |
| | | SLRISCKGSGYTFTSY |
| | | WMNWVRQMPGKGLEWMGRIDPYDSETHYNQKFKDHVTISVDKSI |
| | | STAYLQWSSLKASDTA |
| | | MYYCARGNWDDYWGQGTTVTVSS |
| hzCAR123-22 | 2579 | EVVLTQSPATLSLSPGERATLSCRASKSISKDLAWYQQK |
| scFv | | PGQAPRLLIYSGSTLQSGIPARFSGSGSGTDFTLTISSLEPEDFAVYY |
| | | CQQHNKYPYTFG |
| | | GGTKVEIKGGGGSGGGGSGGGGSGGGGSEVQLVQSGAEVKKPGE |
| | | SLRISCKGSGYTFTSY |
| | | WMNWVRQMPGKGLEWMGRIDPYDSETHYNQKFKDHVTISVDKSI |
| | | STAYLQWSSLKASDTA |
| | | MYYCARGNWDDYWGQGTTVTVSS |
| hzCAR123-23 | 2580 | DVVMTQSPAFLSVTPGEKVTITCRASKSISKDLAWYQQK |
| scFv | | PDQAPKLLIYSGSTLQSGVPSRFSGSGSGTDFTFTISSLEAEDAATYY |
| | | CQQHNKYPYTFG |
| | | GGTKVEIKGGGGSGGGGSGGGGSGGGGSEVQLVQSGAEVKKPGE |
| | | SLRISCKGSGYTFTSY |
| | | WMNWVRQMPGKGLEWMGRIDPYDSETHYNQKFKDHVTISVDKSI |
| | | STAYLQWSSLKASDTA |
| | | MYYCARGNWDDYWGQGTTVTVSS |
| hzCAR123-24 | 2581 | DVVMTQSPDSLAVSLGERATINCRASKSISKDLAWYQQK |
| scFv | | PGQPPKLLIYSGSTLQSGVPDRFSGSGSGTDFTLTISSLQAEDVAVY |
| | | YCQQHNKYPYTFG |
| | | GGTKVEIKGGGGSGGGGSGGGGSGGGGSEVQLVQSGAEVKKPGE |
| | | SLRISCKGSGYTFTSY |
| | | WMNWVRQMPGKGLEWMGRIDPYDSETHYNQKFKDHVTISVDKSI |
| | | STAYLQWSSLKASDTA |
| | | MYYCARGNWDDYWGQGTTVTVSS |
| hzCAR123-25 | 2582 | EVQLVESGGGLVQPGGSLRLSCAASGYTFTSYWMNWVRQ |
| scFv | | APGKGLVWVSRIDPYDSETHYNQKFKDRFTISVDKAKSTAYLQMN |
| | | SLRAEDTAVYYCARG |
| | | NWDDYWGQGTTVTVSSGGGGSGGGGSGGGGSGGGGSDVQLTQS |
| | | PSFLSASVGDRVTITCR |
| | | ASKSISKDLAWYQQKPGKAPKLLIYSGSTLQSGVPSRFSGSGSGTEF |
| | | TLTISSLQPEDFA |
| | | TYYCQQHNKYPYTFGGGTKVEIK |
| hzCAR123-26 | 2583 | EVQLVESGGGLVQPGGSLRLSCAASGYTFTSYWMNWVRQ |
| scFv | | APGKGLVWVSRIDPYDSETHYNQKFKDRFTISVDKAKSTAYLQMN |
| | | SLRAEDTAVYYCARG |
| | | NWDDYWGQGTTVTVSSGGGGSGGGGSGGGGSGGGGSEVVLTQSP |
| | | ATLSLSPGERATLSCR |
| | | ASKSISKDLAWYQQKPGQAPRLLIYSGSTLQSGIPARFSGSGSGTDF |
| | | TLTISSLEPEDFA |
| | | VYYCQQHNKYPYTFGGGTKVEIK |
| hzCAR123-27 | 2584 | EVQLVESGGGLVQPGGSLRLSCAASGYTFTSYWMNWVRQ |
| scFv | | APGKGLVWVSRIDPYDSETHYNQKFKDRFTISVDKAKSTAYLQMN |
| | | SLRAEDTAVYYCARG |
| | | NWDDYWGQGTTVTVSSGGGGSGGGGSGGGGSGGGGSDVVMTQS |
| | | PAFLSVTPGEKVTITCR |
| | | ASKSISKDLAWYQQKPDQAPKLLIYSGSTLQSGVPSRFSGSGSGTDF |
| | | TFTISSLEAEDAA |
| | | TYYCQQHNKYPYTFGGGTKVEIK |
| hzCAR123-28 | 2585 | EVQLVESGGGLVQPGGSLRLSCAASGYTFTSYWMNWVRQ |
| scFv | | APGKGLVWVSRIDPYDSETHYNQKFKDRFTISVDKAKSTAYLQMN |
| | | SLRAEDTAVYYCARG |
| | | NWDDYWGQGTTVTVSSGGGGSGGGGSGGGGSGGGGSDVVMTQS |
| | | PDSLAVSLGERATINCR |
| | | ASKSISKDLAWYQQKPGQPPKLLIYSGSTLQSGVPDRFSGSGSGTDF |
| | | TLTISSLQAEDVA |
| | | VYYCQQHNKYPYTFGGGTKVEIK |
| hzCAR123-29 | 2586 | DVQLTQSPSFLSASVGDRVTITCRASKSISKDLAWYQQK |
| scFv | | PGKAPKLLIYSGSTLQSGVPSRFSGSGSGTEFTLTISSLQPEDFATYY |
| | | CQQHNKYPYTFG |
| | | GGTKVEIKGGGGSGGGGSGGGGSGGGGSEVQLVESGGGLVQPGG |
| | | SLRLSCAASGYTFTSY |
| | | WMNWVRQAPGKGLVWVSRIDPYDSETHYNQKFKDRFTISVDKAK |
| | | STAYLQMNSLRAEDTA |
| | | VYYCARGNWDDYWGQGTTVTVSS |
| hzCAR123-30 | 2587 | EVVLTQSPATLSLSPGERATLSCRASKSISKDLAWYQQK |
| scFv | | PGQAPRLLIYSGSTLQSGIPARFSGSGSGTDFTLTISSLEPEDFAVYY |
| | | CQQHNKYPYTFG |
| | | GGTKVEIKGGGGSGGGGSGGGGSGGGGSEVQLVESGGGLVQPGG |
| | | SLRLSCAASGYTFTSY |
| | | WMNWVRQAPGKGLVWVSRIDPYDSETHYNQKFKDRFTISVDKAK |
| | | STAYLQMNSLRAEDTA |
| | | VYYCARGNWDDYWGQGTTVTVSS |
| hzCAR123-31 | 2588 | DVVMTQSPAFLSVTPGEKVTITCRASKSISKDLAWYQQK |
| scFv | | PDQAPKLLIYSGSTLQSGVPSRFSGSGSGTDFTFTISSLEAEDAATYY |
| | | CQQHNKYPYTFG |
| | | GGTKVEIKGGGGSGGGGSGGGGSGGGGSEVQLVESGGGLVQPGG |
| | | SLRLSCAASGYTFTSY |
| | | WMNWVRQAPGKGLVWVSRIDPYDSETHYNQKFKDRFTISVDKAK |
| | | STAYLQMNSLRAEDTA |
| | | VYYCARGNWDDYWGQGTTVTVSS |
| hzCAR123-32 | 2589 | DVVMTQSPDSLAVSLGERATINCRASKSISKDLAWYQQK |
| scFv | | PGQPPKLLIYSGSTLQSGVPDRFSGSGSGTDFTLTISSLQAEDVAVY |
| | | YCQQHNKYPYTFG |
| | | GGTKVEIKGGGGSGGGGSGGGGSGGGGSEVQLVESGGGLVQPGG |
| | | SLRLSCAASGYTFTSY |
| | | WMNWVRQAPGKGLVWVSRIDPYDSETHYNQKFKDRFTISVDKAK |
| | | STAYLQMNSLRAEDTA |
| | | VYYCARGNWDDYWGQGTTVTVSS |

[0428] In other embodiments, the CAR-expressing cells can specifically bind to CD123, e.g., can include a CAR molecule (e.g., any of the CAR123-1 or CAR123-4 and hzCAR123-1 to hzCAR123-32), or an antigen binding domain according to Tables 2, 6, and 9 of WO2016/028896, incorporated herein by reference. The amino acid and nucleotide sequences encoding the CD123 CAR molecules and antigen binding domains (e.g., including one, two, three VH CDRs; and one, two, three VL CDRs according to Kabat or Chothia), as specified in WO2016/028896, are incorporated herein by reference in their entirety.

### RNA Transfection

[0429] Disclosed herein are methods for producing an in vitro transcribed RNA TOX^{hi} CAR. The present invention also includes a TOX^{hi} CAR construct encoding RNA construct that can be directly transfected into a cell. A method for generating mRNA for use in transfection can involve in vitro transcription (IVT) of a template with specially designed primers, followed by polyA addition, to produce a construct containing 3′ and 5′ untranslated sequence (“UTR”), a 5′ cap and/or Internal Ribosome Entry Site (RES), the nucleic acid to be expressed, and a polyA tail, typically 50-2000 bases (SEQ ID NO: 1468) in length. RNA so produced can efficiently transfect different kinds of cells. In some embodiments, the template includes sequences for the CAR.

[0430] In some embodiments the TOX^{hi} CAR is encoded by a messenger RNA (mRNA). In some embodiments the mRNA encoding the TOX^{hi} CAR is introduced into an immune effector cell, e.g., a T cell or a NK cell, for production of a TOX^{hi} CAR-expressing cell (e.g., TOX^{hi} CAR T cell or TOX^{hi} CAR-expressing NK cell).

[0431] In some embodiments, the in vitro transcribed RNA TOX^{hi} CAR can be introduced to a cell as a form of transient transfection. The RNA is produced by in vitro transcription using a polymerase chain reaction (PCR)-generated template. DNA of interest from any source can be directly converted by PCR into a template for in vitro mRNA synthesis using appropriate primers and RNA polymerase. The source of the DNA can be, for example, genomic DNA, plasmid DNA, phage DNA, cDNA, synthetic DNA sequence or any other appropriate source of DNA. The desired temple for in vitro transcription is a CAR of the present invention. For example, the template for the RNA CAR comprises an extracellular region comprising a single chain variable domain of an anti-tumor antibody; a hinge region, a transmembrane domain (e.g., a transmembrane domain of CD8a); and a cytoplasmic region that includes an intracellular signaling domain, e.g., comprising the signaling domain of CD3-zeta and the signaling domain of 4-1BB.

[0432] In some embodiments, the DNA to be used for PCR contains an open reading frame. The DNA can be from a naturally occurring DNA sequence from the genome of an organism. In some embodiments, the nucleic acid can include some or all of the 5′ and/or 3′ untranslated regions (UTRs). The nucleic acid can include exons and introns. In some embodiments, the DNA to be used for PCR is a human nucleic acid sequence. In some embodiments, the DNA to be used for PCR is a human nucleic acid sequence including the 5′ and 3′ UTRs. The DNA can alternatively be an artificial DNA sequence that is not normally expressed in a naturally occurring organism. An exemplary artificial DNA sequence is one that contains portions of genes that are ligated together to form an open reading frame that encodes a fusion protein. The portions of DNA that are ligated together can be from a single organism or from more than one organism.

[0433] PCR is used to generate a template for in vitro transcription of mRNA which is used for transfection. Methods for performing PCR are well known in the art. Primers for use in PCR are designed to have regions that are substantially complementary to regions of the DNA to be used as a template for the PCR. “Substantially complementary,” as used herein, refers to sequences of nucleotides where a majority or all of the bases in the primer sequence are complementary, or one or more bases are non-complementary, or mismatched. Substantially complementary sequences are able to anneal or hybridize with the intended DNA target under annealing conditions used for PCR. The primers can be designed to be substantially complementary to any portion of the DNA template. For example, the primers can be designed to amplify the portion of a nucleic acid that is normally transcribed in cells (the open reading frame), including 5′ and 3′ UTRs. The primers can also be designed to amplify a portion of a nucleic acid that encodes a particular domain of interest. In some embodiments, the primers are designed to amplify the coding region of a human cDNA, including all or portions of the 5′ and 3′ UTRs. Primers useful for PCR can be generated by synthetic methods that are well known in the art. “Forward primers” are primers that contain a region of nucleotides that are substantially complementary to nucleotides on the DNA template that are upstream of the DNA sequence that is to be amplified. “Upstream” is used herein to refer to a location 5, to the DNA sequence to be amplified relative to the coding strand. “Reverse primers” are primers that contain a region of nucleotides that are substantially complementary to a double-stranded DNA template that are downstream of the DNA sequence that is to be amplified. “Downstream” is used herein to refer to a location 3′ to the DNA sequence to be amplified relative to the coding strand.

[0434] Any DNA polymerase useful for PCR can be used in the methods disclosed herein. The reagents and polymerase are commercially available from a number of sources.

[0435] Chemical structures with the ability to promote stability and/or translation efficiency may also be used. The RNA preferably has 5′ and 3′ UTRs. In some embodiments, the 5′ UTR is between one and 3000 nucleotides in length. The length of 5′ and 3′ UTR sequences to be added to the coding region can be altered by different methods, including, but not limited to, designing primers for PCR that anneal to different regions of the UTRs. Using this approach, one of ordinary skill in the art can modify the 5′ and 3′ UTR lengths required to achieve optimal translation efficiency following transfection of the transcribed RNA.

[0436] The 5′ and 3′ UTRs can be the naturally occurring, endogenous 5′ and 3′ UTRs for the nucleic acid of interest. Alternatively, UTR sequences that are not endogenous to the nucleic acid of interest can be added by incorporating the UTR sequences into the forward and reverse primers or by any other modifications of the template. The use of UTR sequences that are not endogenous to the nucleic acid of interest can be useful for modifying the stability and/or translation efficiency of the RNA. For example, it is known that AU-rich elements in 3′ UTR sequences can decrease the stability of mRNA. Therefore, 3′ UTRs can be selected or designed to increase the stability of the transcribed RNA based on properties of UTRs that are well known in the art.

[0437] In some embodiments, the 5′ UTR can contain the Kozak sequence of the endogenous nucleic acid. Alternatively, when a 5′ UTR that is not endogenous to the nucleic acid of interest is being added by PCR as described above, a consensus Kozak sequence can be redesigned by adding the 5′ UTR sequence. Kozak sequences can increase the efficiency of translation of some RNA transcripts, but does not appear to be required for all RNAs to enable efficient translation. The requirement for Kozak sequences for many mRNAs is known in the art. In other embodiments the 5′ UTR can be 5′UTR of an RNA virus whose RNA genome is stable in cells. In other embodiments various nucleotide analogues can be used in the 3′ or 5′ UTR to impede exonuclease degradation of the mRNA.

[0438] To enable synthesis of RNA from a DNA template without the need for gene cloning, a promoter of transcription should be attached to the DNA template upstream of the sequence to be transcribed. When a sequence that functions as a promoter for an RNA polymerase is added to the 5′ end of the forward primer, the RNA polymerase promoter becomes incorporated into the PCR product upstream of the open reading frame that is to be transcribed. In some embodiments, the promoter is a T7 polymerase promoter, as described elsewhere herein. Other useful promoters include, but are not limited to, T3 and SP6 RNA polymerase promoters. Consensus nucleotide sequences for T7, T3 and SP6 promoters are known in the art.

[0439] In some embodiments, the mRNA has both a cap on the 5′ end and a 3′ poly(A) tail which determine ribosome binding, initiation of translation and stability mRNA in the cell. On a circular DNA template, for instance, plasmid DNA, RNA polymerase produces a long concatameric product which is not suitable for expression in eukaryotic cells. The transcription of plasmid DNA linearized at the end of the 3′ UTR results in normal sized mRNA which is not effective in eukaryotic transfection even if it is polyadenylated after transcription.

[0440] On a linear DNA template, phage T7 RNA polymerase can extend the 3′ end of the transcript beyond the last base of the template (Schenborn and Mierendorf, Nuc Acids Res., 13:6223-36 (1985); Nacheva and Berzal-Herranz, Eur. J. Biochem., 270:1485-65 (2003).

[0441] The conventional method of integration of polyA/T stretches into a DNA template is molecular cloning. However polyA/T sequence integrated into plasmid DNA can cause plasmid instability, which is why plasmid DNA templates obtained from bacterial cells are often highly contaminated with deletions and other aberrations. This makes cloning procedures not only laborious and time consuming but often not reliable. That is why a method which allows construction of DNA templates with polyA/T 3′ stretch without cloning highly desirable.

[0442] The polyA/T segment of the transcriptional DNA template can be produced during PCR by using a reverse primer containing a polyT tail, such as 100T tail (SEQ ID NO: 1469) (size can be 50-5000 T (SEQ ID NO: 1470)), or after PCR by any other method, including, but not limited to, DNA ligation or in vitro recombination. Poly(A) tails also provide stability to RNAs and reduce their degradation. Generally, the length of a poly(A) tail positively correlates with the stability of the transcribed RNA. In some embodiments, the poly(A) tail is between 100 and 5000 adenosines (SEQ ID NO: 1471).

[0443] Poly(A) tails of RNAs can be further extended following in vitro transcription with the use of a poly(A) polymerase, such as E. coli polyA polymerase (E-PAP). In some embodiments, increasing the length of a poly(A) tail from 100 nucleotides to between 300 and 400 nucleotides (SEQ ID NO: 1472) results in about a two-fold increase in the translation efficiency of the RNA. Additionally, the attachment of different chemical groups to the 3′ end can increase mRNA stability. Such attachment can contain modified/artificial nucleotides, aptamers and other compounds. For example, ATP analogs can be incorporated into the poly(A) tail using poly(A) polymerase. ATP analogs can further increase the stability of the RNA.

[0444] 5′ caps on also provide stability to RNA molecules. In some embodiments, RNAs produced by the methods disclosed herein include a 5′ cap. The 5′ cap is provided using techniques known in the art and described herein (Cougot, et al., Trends in Biochem. Sci., 29:436-444 (2001); Stepinski, et al., RNA, 7:1468-95 (2001); Elango, et al., Biochim. Biophys. Res. Commun., 330:958-966 (2005)).

[0445] The RNAs produced by the methods disclosed herein can also contain an internal ribosome entry site (IRES) sequence. The IRES sequence may be any viral, chromosomal or artificially designed sequence which initiates cap-independent ribosome binding to mRNA and facilitates the initiation of translation. Any solutes suitable for cell electroporation, which can contain factors facilitating cellular permeability and viability such as sugars, peptides, lipids, proteins, antioxidants, and surfactants can be included.

[0446] RNA can be introduced into target cells using any of a number of different methods, for instance, commercially available methods which include, but are not limited to, electroporation (Amaxa Nucleofector-II (Amaxa Biosystems, Cologne, Germany)), (ECM 830 (BTX) (Harvard Instruments, Boston, Mass.) or the Gene Pulser II (BioRad, Denver, Colo.), Multiporator (Eppendort, Hamburg Germany), cationic liposome mediated transfection using lipofection, polymer encapsulation, peptide mediated transfection, or biolistic particle delivery systems such as “gene guns” (see, for example, Nishikawa, et al. Hum Gene Ther., 12(8):861-70 (2001).

[0447] Non-Viral Delivery Methods

[0448] In some embodiments, non-viral methods can be used to deliver a nucleic acid encoding a TOX^{hi} CAR described herein into a cell or tissue or a subject.

[0449] In some embodiments, the non-viral method includes the use of a transposon (also called a transposable element). In some embodiments, a transposon is a piece of DNA that can insert itself at a location in a genome, for example, a piece of DNA that is capable of self-replicating and inserting its copy into a genome, or a piece of DNA that can be spliced out of a longer nucleic acid and inserted into another place in a genome. For example, a transposon comprises a DNA sequence made up of inverted repeats flanking genes for transposition.

[0450] Exemplary methods of nucleic acid delivery using a transposon include a Sleeping Beauty transposon system (SBTS) and a piggyBac (PB) transposon system. See, e.g., Aronovich et al. Hum. Mol. Genet. 20.R1(2011):R14-20; Singh et al. Cancer Res. 15(2008):2961-2971; Huang et al. Mol. Ther. 16(2008):580-589; Grabundzija et al. Mol. Ther. 18(2010):1200-1209; Kebriaei et al. Blood. 122.21(2013):166; Williams. Molecular Therapy 16.9(2008):1515-16; Bell et al. Nat. Protoc. 2.12(2007):3153-65; and Ding et al. Cell. 122.3(2005):473-83, all of which are incorporated herein by reference.

[0451] The SBTS includes two components: 1) a transposon containing a transgene and 2) a source of transposase enzyme. The transposase can transpose the transposon from a carrier plasmid (or other donor DNA) to a target DNA, such as a host cell chromosome/genome. For example, the transposase binds to the carrier plasmid/donor DNA, cuts the transposon (including transgene(s)) out of the plasmid, and inserts it into the genome of the host cell. See, e.g., Aronovich et al. supra.

[0452] Exemplary transposons include a pT2-based transposon. See, e.g., Grabundzija et al. Nucleic Acids Res. 41.3(2013):1829-47; and Singh et al. Cancer Res. 68.8(2008): 2961-2971, all of which are incorporated herein by reference. Exemplary transposases include a Tc1/mariner-type transposase, e.g., the SB 10 transposase or the SB 11 transposase (a hyperactive transposase which can be expressed, e.g., from a cytomegalovirus promoter). See, e.g., Aronovich et al.; Kebriaei et al.; and Grabundzija et al., all of which are incorporated herein by reference.

[0453] Use of the SBTS permits efficient integration and expression of a transgene, e.g., a nucleic acid encoding a TOX^{hi} CAR described herein. Provided herein are methods of generating a cell, e.g., T cell or NK cell, that stably expresses a TOX^{hi} CAR described herein, e.g., using a transposon system such as SBTS.

[0454] In accordance with methods described herein, in some embodiments, one or more nucleic acids, e.g., plasmids, containing the SBTS components are delivered to a cell (e.g., T or NK cell). For example, the nucleic acid(s) are delivered by standard methods of nucleic acid (e.g., plasmid DNA) delivery, e.g., methods described herein, e.g., electroporation, transfection, or lipofection. In some embodiments, the nucleic acid contains a transposon comprising a transgene, e.g., a nucleic acid encoding a CAR described herein. In some embodiments, the nucleic acid contains a transposon comprising a transgene (e.g., a nucleic acid encoding a TOX^{hi} CAR described herein) as well as a nucleic acid sequence encoding a transposase enzyme. In other embodiments, a system with two nucleic acids is provided, e.g., a dual-plasmid system, e.g., where a first plasmid contains a transposon comprising a transgene, and a second plasmid contains a nucleic acid sequence encoding a transposase enzyme. For example, the first and the second nucleic acids are co-delivered into a host cell.

[0455] In some embodiments, cells, e.g., T or NK cells, are generated that express a TOX^{hi} CAR described herein by using a combination of gene insertion using the SBTS and genetic editing using a nuclease (e.g., Zinc finger nucleases (ZFNs), Transcription Activator-Like Effector Nucleases (TALENs), the CRISPR/Cas system, or engineered meganuclease re-engineered homing endonucleases).

[0456] In some embodiments, use of a non-viral method of delivery permits reprogramming of cells, e.g., T or NK cells, and direct infusion of the cells into a subject. Advantages of non-viral vectors include but are not limited to the ease and relatively low cost of producing sufficient amounts required to meet a patient population, stability during storage, and lack of immunogenicity.

### Nucleic Acid Constructs Encoding a CAR

[0457] The present invention also provides nucleic acid molecules encoding one or more TOX^{hi} CAR constructs described herein. In some embodiments, the nucleic acid molecule is provided as a messenger RNA transcript. In some embodiments, the nucleic acid molecule is provided as a DNA construct.

[0458] Accordingly, in some embodiments, the invention pertains to an isolated nucleic acid molecule encoding a TOX^{hi} CAR, wherein the CAR comprises an antigen binding domain, a transmembrane domain, and an intracellular signaling domain comprising a stimulatory domain, e.g., a costimulatory signaling domain and/or a primary signaling domain, e.g., zeta chain.

[0459] The nucleic acid sequences coding for the desired molecules can be obtained using recombinant methods known in the art, such as, for example by screening libraries from cells expressing the gene, by deriving the gene from a vector known to include the same, or by isolating directly from cells and tissues containing the same, using standard techniques. Alternatively, the gene of interest can be produced synthetically, rather than cloned.

[0460] The present invention also provides vectors in which a DNA of the present invention is inserted. Vectors derived from retroviruses such as the lentivirus are suitable tools to achieve long-term gene transfer since they allow long-term, stable integration of a transgene and its propagation in daughter cells. Lentiviral vectors have the added advantage over vectors derived from onco-retroviruses such as murine leukemia viruses in that they can transduce non-proliferating cells, such as hepatocytes. They also have the added advantage of low immunogenicity. A retroviral vector may also be, e.g., a gammaretroviral vector. A gammaretroviral vector may include, e.g., a promoter, a packaging signal (w), a primer binding site (PBS), one or more (e.g., two) long terminal repeats (LTR), and a transgene of interest, e.g., a gene encoding a CAR. A gammaretroviral vector may lack viral structural gens such as gag, pol, and env. Exemplary gammaretroviral vectors include Murine Leukemia Virus (MLV), Spleen-Focus Forming Virus (SFFV), and Myeloproliferative Sarcoma Virus (MPSV), and vectors derived therefrom. Other gammaretroviral vectors are described, e.g., in Tobias Maetzig et al., “Gammaretroviral Vectors: Biology, Technology and Application” Viruses. 2011 June; 3(6): 677-713.

[0461] In some embodiments, the vector comprising the nucleic acid encoding the desired CAR of the invention is an adenoviral vector (A5/35). In some embodiments, the expression of nucleic acids encoding CAR IL-15R/IL-15 can be accomplished using of transposons such as sleeping beauty, CRISPR, CAS9, and zinc finger nucleases. See below June et al. 2009 Nature Reviews Immunology 9.10: 704-716, is incorporated herein by reference.

[0462] In brief summary, the expression of natural or synthetic nucleic acids TOX^{hi} CAR is typically achieved by operably linking a nucleic acid encoding the TOX^{hi} CAR polypeptide or portions thereof to a promoter, and incorporating the construct into an expression vector. The vectors can be suitable for replication and integration eukaryotes. Typical cloning vectors contain transcription and translation terminators, initiation sequences, and promoters useful for regulation of the expression of the desired nucleic acid sequence.

[0463] The expression constructs of the present invention may also be used for nucleic acid immunization and gene therapy, using standard gene delivery protocols. Methods for gene delivery are known in the art. See, e.g., U.S. Pat. Nos. 5,399,346, 5,580,859, 5,589,466, incorporated by reference herein in their entireties. In some embodiments, the invention provides a gene therapy vector.

[0464] The nucleic acid can be cloned into a number of types of vectors. For example, the nucleic acid can be cloned into a vector including, but not limited to a plasmid, a phagemid, a phage derivative, an animal virus, and a cosmid. Vectors of particular interest include expression vectors, replication vectors, probe generation vectors, and sequencing vectors.

[0465] Further, the expression vector may be provided to a cell in the form of a viral vector. Viral vector technology is well known in the art and is described, for example, in Sambrook et al., 2012, MOLECULAR CLONING: A LABORATORY MANUAL, volumes 1-4, Cold Spring Harbor Press, NY), and in other virology and molecular biology manuals. Viruses, which are useful as vectors include, but are not limited to, retroviruses, adenoviruses, adeno-associated viruses, herpes viruses, and lentiviruses. In general, a suitable vector contains an origin of replication functional in at least one organism, a promoter sequence, convenient restriction endonuclease sites, and one or more selectable markers, (e.g., WO 01/96584; WO 01/29058; and U.S. Pat. No. 6,326,193).

[0466] A number of viral based systems have been developed for gene transfer into mammalian cells. For example, retroviruses provide a convenient platform for gene delivery systems. A selected gene can be inserted into a vector and packaged in retroviral particles using techniques known in the art. The recombinant virus can then be isolated and delivered to cells of the subject either in vivo or ex vivo. A number of retroviral systems are known in the art. In some embodiments, adenovirus vectors are used. A number of adenovirus vectors are known in the art. In some embodiments, lentivirus vectors are used.

[0467] Additional promoter elements, e.g., enhancers, regulate the frequency of transcriptional initiation. Typically, these are located in the region 30-110 bp upstream of the start site, although a number of promoters have been shown to contain functional elements downstream of the start site as well. The spacing between promoter elements frequently is flexible, so that promoter function is preserved when elements are inverted or moved relative to one another. In the thymidine kinase (tk) promoter, the spacing between promoter elements can be increased to 50 bp apart before activity begins to decline. Depending on the promoter, it appears that individual elements can function either cooperatively or independently to activate transcription.

[0468] An example of a promoter that is capable of expressing a TOX^{hi} CAR transgene in a mammalian T cell is the EF1a promoter. The native EF1a promoter drives expression of the alpha subunit of the elongation factor-1 complex, which is responsible for the enzymatic delivery of aminoacyl tRNAs to the ribosome. The EF1a promoter has been extensively used in mammalian expression plasmids and has been shown to be effective in driving TOX^{hi} CAR expression from transgenes cloned into a lentiviral vector. See, e.g., Milone et al., Mol. Ther. 17(8): 1453-1464 (2009).

[0469] Another example of a promoter is the immediate early cytomegalovirus (CMV) promoter sequence. This promoter sequence is a strong constitutive promoter sequence capable of driving high levels of expression of any polynucleotide sequence operatively linked thereto. However, other constitutive promoter sequences may also be used, including, but not limited to the simian virus 40 (SV40) early promoter, mouse mammary tumor virus (MMTV), human immunodeficiency virus (HIV) long terminal repeat (LTR) promoter, MoMuLV promoter, an avian leukemia virus promoter, an Epstein-Barr virus immediate early promoter, a Rous sarcoma virus promoter, as well as human gene promoters such as, but not limited to, the actin promoter, the myosin promoter, the elongation factor-1 promoter, the hemoglobin promoter, and the creatine kinase promoter. Further, the invention should not be limited to the use of constitutive promoters. Inducible promoters are also contemplated as part of the invention. The use of an inducible promoter provides a molecular switch capable of turning on expression of the polynucleotide sequence which it is operatively linked when such expression is desired, or turning off the expression when expression is not desired. Examples of inducible promoters include, but are not limited to a metallothionine promoter, a glucocorticoid promoter, a progesterone promoter, and a tetracycline promoter.

[0470] Another example of a promoter is the phosphoglycerate kinase (PGK) promoter. In embodiments, a truncated PGK promoter (e.g., a PGK promoter with one or more, e.g., 1, 2, 5, 10, 100, 200, 300, or 400, nucleotide deletions when compared to the wild-type PGK promoter sequence) may be desired. The nucleotide sequences of exemplary PGK promoters are provided below.

WT PGK Promoter
(SEQ ID NO: 1473)
ACCCCTCTCTCCAGCCACTAAGCCAGTTGCTCCCTCGGCTGACGGCTGCA
CGCGAGGCCTCCGAACGTCTTACGCCTTGTGGCGCGCCCGTCCTTGTCCC
GGGTGTGATGGCGGGGTGTGGGGCGGAGGGCGTGGCGGGGAAGGGCCGGC
GACGAGAGCCGCGCGGGACGACTCGTCGGCGATAACCGGTGTCGGGTAGC
GCCAGCCGCGCGACGGTAACGAGGGACCGCGACAGGCAGACGCTCCCATG
ATCACTCTGCACGCCGAAGGCAAATAGTGCAGGCCGTGCGGCGCTTGGCG
TTCCTTGGAAGGGCTGAATCCCCGCCTCGTCCTTCGCAGCGGCCCCCCGG
GTGTTCCCATCGCCGCTTCTAGGCCCACTGCGACGCTTGCCTGCACTTCT
TACACGCTCTGGGTCCCAGCCGCGGCGACGCAAAGGGCCTTGGTGCGGGT
CTCGTCGGCGCAGGGACGCGTTTGGGTCCCGACGGAACCTTTTCCGCGTT
GGGGTTGGGGCACCATAAGCT
Exemplary truncated PGK Promoters:
PGK100:
(SEQ ID NO: 1474)
ACCCCTCTCTCCAGCCACTAAGCCAGTTGCTCCCTCGGCTGACGGCTGCA
CGCGAGGCCTCCGAACGTCTTACGCCTTGTGGCGCGCCCGTCCTTGTCCC
GGGTGTGATGGCGGGGTG
PGK200:
(SEQ ID NO: 1475)
ACCCCTCTCTCCAGCCACTAAGCCAGTTGCTCCCTCGGCTGACGGCTGCA
CGCGAGGCCTCCGAACGTCTTACGCCTTGTGGCGCGCCCGTCCTTGTCCC
GGGTGTGATGGCGGGGTGTGGGGCGGAGGGCGTGGCGGGGAAGGGCCGGC
GACGAGAGCCGCGCGGGACGACTCGTCGGCGATAACCGGTGTCGGGTAGC
GCCAGCCGCGCGACGGTAACG
PGK300:
(SEQ ID NO: 1476)
ACCCCTCTCTCCAGCCACTAAGCCAGTTGCTCCCTCGGCTGACGGCTGCA
CGCGAGGCCTCCGAACGTCTTACGCCTTGTGGCGCGCCCGTCCTTGTCCC
GGGTGTGATGGCGGGGTGTGGGGCGGAGGGCGTGGCGGGGAAGGGCCGGC
GACGAGAGCCGCGCGGGACGACTCGTCGGCGATAACCGGTGTCGGGTAGC
GCCAGCCGCGCGACGGTAACGAGGGACCGCGACAGGCAGACGCTCCCATG
ATCACTCTGCACGCCGAAGGCAAATAGTGCAGGCCGTGCGGCGCTTGGCG
TTCCTTGGAAGGGCTGAATCCCCG
PGK400:
(SEQ ID NO: 1477)
ACCCCTCTCTCCAGCCACTAAGCCAGTTGCTCCCTCGGCTGACGGCTGCA
CGCGAGGCCTCCGAACGTCTTACGCCTTGTGGCGCGCCCGTCCTTGTCCC
GGGTGTGATGGCGGGGTGTGGGGCGGAGGGCGTGGCGGGGAAGGGCCGGC
GACGAGAGCCGCGCGGGACGACTCGTCGGCGATAACCGGTGTCGGGTAGC
GCCAGCCGCGCGACGGTAACGAGGGACCGCGACAGGCAGACGCTCCCATG
ATCACTCTGCACGCCGAAGGCAAATAGTGCAGGCCGTGCGGCGCTTGGCG
TTCCTTGGAAGGGCTGAATCCCCGCCTCGTCCTTCGCAGCGGCCCCCCGG
GTGTTCCCATCGCCGCTTCTAGGCCCACTGCGACGCTTGCCTGCACTTCT
TACACGCTCTGGGTCCCAGCCG

[0471] A vector may also include, e.g., a signal sequence to facilitate secretion, a polyadenylation signal and transcription terminator (e.g., from Bovine Growth Hormone (BGH) gene), an element allowing episomal replication and replication in prokaryotes (e.g. SV40 origin and ColE1 or others known in the art) and/or elements to allow selection (e.g., ampicillin resistance gene and/or zeocin marker).

[0472] In order to assess the expression of a TOX^{hi} CAR polypeptide or portions thereof, the expression vector to be introduced into a cell can also contain either a selectable marker gene or a reporter gene or both to facilitate identification and selection of expressing cells from the population of cells sought to be transfected or infected through viral vectors. In other embodiments, the selectable marker may be carried on a separate piece of DNA and used in a co-transfection procedure. Both selectable markers and reporter genes may be flanked with appropriate regulatory sequences to enable expression in the host cells. Useful selectable markers include, for example, antibiotic-resistance genes, such as neo and the like.

[0473] Reporter genes are used for identifying potentially transfected cells and for evaluating the functionality of regulatory sequences. In general, a reporter gene is a gene that is not present in or expressed by the recipient organism or tissue and that encodes a polypeptide whose expression is manifested by some easily detectable property, e.g., enzymatic activity. Expression of the reporter gene is assayed at a suitable time after the DNA has been introduced into the recipient cells. Suitable reporter genes may include genes encoding luciferase, beta-galactosidase, chloramphenicol acetyl transferase, secreted alkaline phosphatase, or the green fluorescent protein gene (e.g., Ui-Tei et al., 2000 FEBS Letters 479: 79-82). Suitable expression systems are well known and may be prepared using known techniques or obtained commercially. In general, the construct with the minimal 5′ flanking region showing the highest level of expression of reporter gene is identified as the promoter. Such promoter regions may be linked to a reporter gene and used to evaluate agents for the ability to modulate promoter-driven transcription.

[0474] In some embodiments, the vector can further comprise a nucleic acid encoding a second CAR. In some embodiments, the second CAR includes an antigen binding domain to a target expressed on acute myeloid leukemia cells, such as, e.g., CD123, CD34, CLL-1, folate receptor beta, or FLT3; or a target expressed on a B cell, e.g., CD10, CD19, CD20, CD22, CD34, CD123, FLT-3, ROR1, CD79b, CD179b, or CD79a. In some embodiments, the vector comprises a nucleic acid sequence encoding a first CAR that specifically binds a first antigen and includes an intracellular signaling domain having a costimulatory signaling domain but not a primary signaling domain, and a nucleic acid encoding a second CAR that specifically binds a second, different, antigen and includes an intracellular signaling domain having a primary signaling domain but not a costimulatory signaling domain.

[0475] In some embodiments, the vector comprises a nucleic acid encoding a TOX^{hi} CAR described herein and a nucleic acid encoding an inhibitory CAR. In some embodiments, the inhibitory CAR comprises an antigen binding domain that binds an antigen found on normal cells but not cancer cells. In some embodiments, the inhibitory CAR comprises the antigen binding domain, a transmembrane domain and an intracellular domain of an inhibitory molecule. For example, the intracellular domain of the inhibitory CAR can be an intracellular domain of PD1, PD-L1, PD-L2, CTLA4, TIM3, CEACAM (e.g., CEACAM-1, CEACAM-3 and/or CEACAM-5), LAGS, VISTA, BTLA, TIGIT, LAIR1, CD160, 2B4, CD80, CD86, B7-H3 (CD276), B7-H4 (VTCN1), HVEM (TNFRSF14 or CD270), KIR, A2aR, MHC class I, MHC class II, GALS, adenosine, and TGF beta.

[0476] In embodiments, the vector may comprise two or more nucleic acid sequences encoding a TOX^{hi} CAR, e.g., a TOX^{hi} CAR described herein and a second CAR, e.g., an inhibitory CAR or a CAR that specifically binds to a different antigen. In such embodiments, the two or more nucleic acid sequences encoding the TOX^{hi} CAR are encoded by a single nucleic molecule in the same frame and as a single polypeptide chain. In some embodiments, the two or more CARs, can, e.g., be separated by one or more peptide cleavage sites. (e.g., an auto-cleavage site or a substrate for an intracellular protease). Examples of peptide cleavage sites include the following, wherein the GSG residues are optional:

T2A:
(SEQ ID NO: 1478)
(GSG) E G R G S L L T C G D V E E N P G P
P2A:
(SEQ ID NO: 1479)
(GSG) A T N F S L L K Q A G D V E E N P G P
E2A:
(SEQ ID NO: 1480)
(GSG) Q C T N Y A L L K L A G D V E S N P G P
F2A:
(SEQ ID NO: 1481)
(GSG) V K Q T L N F D L L K L A G D V E S N P G P

[0477] Methods of introducing and expressing genes into a cell are known in the art. In the context of an expression vector, the vector can be readily introduced into a host cell, e.g., mammalian, bacterial, yeast, or insect cell by any method in the art. For example, the expression vector can be transferred into a host cell by physical, chemical, or biological means.

[0478] Physical methods for introducing a polynucleotide into a host cell include calcium phosphate precipitation, lipofection, particle bombardment, microinjection, electroporation, and the like. Methods for producing cells comprising vectors and/or exogenous nucleic acids are well-known in the art. See, for example, Sambrook et al., 2012, MOLECULAR CLONING: A LABORATORY MANUAL, volumes 1-4, Cold Spring Harbor Press, NY). A preferred method for the introduction of a polynucleotide into a host cell is calcium phosphate transfection

[0479] Biological methods for introducing a polynucleotide of interest into a host cell include the use of DNA and RNA vectors. Viral vectors, and especially retroviral vectors, have become the most widely used method for inserting genes into mammalian, e.g., human cells. Other viral vectors can be derived from lentivirus, poxviruses, herpes simplex virus I, adenoviruses and adeno-associated viruses, and the like. See, for example, U.S. Pat. Nos. 5,350,674 and 5,585,362.

[0480] Chemical means for introducing a polynucleotide into a host cell include colloidal dispersion systems, such as macromolecule complexes, nanocapsules, microspheres, beads, and lipid-based systems including oil-in-water emulsions, micelles, mixed micelles, and liposomes. An exemplary colloidal system for use as a delivery vehicle in vitro and in vivo is a liposome (e.g., an artificial membrane vesicle). Other methods of state-of-the-art targeted delivery of nucleic acids are available, such as delivery of polynucleotides with targeted nanoparticles or other suitable sub-micron sized delivery system.

[0481] In the case where a non-viral delivery system is utilized, an exemplary delivery vehicle is a liposome. The use of lipid formulations is contemplated for the introduction of the nucleic acids into a host cell (in vitro, ex vivo or in vivo). In some embodiments, the nucleic acid may be associated with a lipid. The nucleic acid associated with a lipid may be encapsulated in the aqueous interior of a liposome, interspersed within the lipid bilayer of a liposome, attached to a liposome via a linking molecule that is associated with both the liposome and the oligonucleotide, entrapped in a liposome, complexed with a liposome, dispersed in a solution containing a lipid, mixed with a lipid, combined with a lipid, contained as a suspension in a lipid, contained or complexed with a micelle, or otherwise associated with a lipid. Lipid, lipid/DNA or lipid/expression vector associated compositions are not limited to any particular structure in solution. For example, they may be present in a bilayer structure, as micelles, or with a “collapsed” structure. They may also simply be interspersed in a solution, possibly forming aggregates that are not uniform in size or shape. Lipids are fatty substances which may be naturally occurring or synthetic lipids. For example, lipids include the fatty droplets that naturally occur in the cytoplasm as well as the class of compounds which contain long-chain aliphatic hydrocarbons and their derivatives, such as fatty acids, alcohols, amines, amino alcohols, and aldehydes.

[0482] Lipids suitable for use can be obtained from commercial sources. For example, dimyristyl phosphatidylcholine (“DMPC”) can be obtained from Sigma, St. Louis, Mo.; dicetyl phosphate (“DCP”) can be obtained from K & K Laboratories (Plainview, N.Y.); cholesterol (“Choi”) can be obtained from Calbiochem-Behring; dimyristyl phosphatidylglycerol (“DMPG”) and other lipids may be obtained from Avanti Polar Lipids, Inc. (Birmingham, Ala.). Stock solutions of lipids in chloroform or chloroform/methanol can be stored at about −20° C. Chloroform is used as the only solvent since it is more readily evaporated than methanol. “Liposome” is a generic term encompassing a variety of single and multilamellar lipid vehicles formed by the generation of enclosed lipid bilayers or aggregates. Liposomes can be characterized as having vesicular structures with a phospholipid bilayer membrane and an inner aqueous medium. Multilamellar liposomes have multiple lipid layers separated by aqueous medium. They form spontaneously when phospholipids are suspended in an excess of aqueous solution. The lipid components undergo self-rearrangement before the formation of closed structures and entrap water and dissolved solutes between the lipid bilayers (Ghosh et al., 1991 Glycobiology 5: 505-10). However, compositions that have different structures in solution than the normal vesicular structure are also encompassed. For example, the lipids may assume a micellar structure or merely exist as nonuniform aggregates of lipid molecules. Also contemplated are lipofectamine-nucleic acid complexes.

[0483] Regardless of the method used to introduce exogenous nucleic acids into a host cell or otherwise expose a cell to the inhibitor of the present invention, in order to confirm the presence of the recombinant DNA sequence in the host cell, a variety of assays may be performed. Such assays include, for example, “molecular biological” assays well known to those of skill in the art, such as Southern and Northern blotting, RT-PCR and PCR; “biochemical” assays, such as detecting the presence or absence of a particular peptide, e.g., by immunological means (ELISAs and Western blots) or by assays described herein to identify agents falling within the scope of the invention.

[0484] The present invention further provides a vector comprising a TOX^{hi} CAR encoding nucleic acid molecule. In some embodiments, a TOX^{hi} CAR vector can be directly transduced into a cell, e.g., a T cell or NK cell. In some embodiments, the vector is a cloning or expression vector, e.g., a vector including, but not limited to, one or more plasmids (e.g., expression plasmids, cloning vectors, minicircles, minivectors, double minute chromosomes), retroviral and lentiviral vector constructs. In some embodiments, the vector is a multicistronic vector. In some embodiments, the vector is capable of expressing the TOX^{hi} CAR construct in mammalian T cells or NK cells. In some embodiments, the mammalian T cell is a human T cell. In some embodiments, the mammalian NK cell is a human NK cell. In some embodiments, the T cell is autologous. In some embodiments, the T cell is allogeneic.

### Sources of Cells

[0485] Prior to expansion and genetic modification, a source of cells, e.g., immune effector cells (e.g., T cells or NK cells), is obtained from a subject. The term “subject” is intended to include living organisms in which an immune response can be elicited (e.g., mammals). Examples of subjects include humans, dogs, cats, mice, rats, and transgenic species thereof. T cells can be obtained from a number of sources, including peripheral blood mononuclear cells, bone marrow, lymph node tissue, cord blood, thymus tissue, tissue from a site of infection, ascites, pleural effusion, spleen tissue, and tumors.

[0486] In certain embodiments of the present invention, any number of immune effector cell (e.g., T cell or NK cell) lines available in the art, may be used. In certain embodiments of the present invention, T cells can be obtained from a unit of blood collected from a subject using any number of techniques known to the skilled artisan, such as Ficoll™ separation. In some embodiments, cells from the circulating blood of an individual are obtained by apheresis. The apheresis product typically contains lymphocytes, including T cells, monocytes, granulocytes, B cells, other nucleated white blood cells, red blood cells, and platelets. In some embodiments, the cells collected by apheresis may be washed to remove the plasma fraction and to place the cells in an appropriate buffer or media for subsequent processing steps. In some embodiments of the invention, the cells are washed with phosphate buffered saline (PBS). In some embodiments, the wash solution lacks calcium and may lack magnesium or may lack many if not all divalent cations.

[0487] Initial activation steps in the absence of calcium can lead to magnified activation. As those of ordinary skill in the art would readily appreciate a washing step may be accomplished by methods known to those in the art, such as by using a semi-automated “flow-through” centrifuge (for example, the Cobe 2991 cell processor, the Baxter CytoMate, or the Haemonetics Cell Saver 5) according to the manufacturer's instructions. After washing, the cells may be resuspended in a variety of biocompatible buffers, such as, for example, Ca-free, Mg-free PBS, PlasmaLyte A, or other saline solution with or without buffer. Alternatively, the undesirable components of the apheresis sample may be removed and the cells directly resuspended in culture media.

[0488] It is recognized that the methods of the application can utilize culture media conditions comprising 5% or less, for example 2%, human AB serum, and employ known culture media conditions and compositions, for example those described in Smith et al., “Ex vivo expansion of human T cells for adoptive immunotherapy using the novel Xeno-free CTS Immune Cell Serum Replacement” Clinical & Translational Immunology (2015) 4, e31; doi:10.1038/cti.2014.31.

[0489] In some embodiments, T cells are isolated from peripheral blood lymphocytes by lysing the red blood cells and depleting the monocytes, for example, by centrifugation through a PERCOLL™ gradient or by counterflow centrifugal elutriation. A specific subpopulation of T cells, such as CD3+, CD4+, CD8+, CD45RA+, and/or CD45RO+ T cells, can be further isolated by positive or negative selection techniques. For example, in some embodiments, T cells are isolated by incubation with anti-CD3/anti-CD28 (e.g., 3×28)-conjugated beads, such as DYNABEADS® M-450 CD3/CD28 T, for a time period sufficient for positive selection of the desired T cells. In some embodiments, the time period is about 30 minutes. In some embodiments, the time period ranges from 30 minutes to 36 hours or longer and all integer values there between. In some embodiments, the time period is at least 1, 2, 3, 4, 5, or 6 hours. In some embodiments, the time period is 10 to 24 hours. In some embodiments, the incubation time period is 24 hours. Longer incubation times may be used to isolate T cells in any situation where there are few T cells as compared to other cell types, such in isolating tumor infiltrating lymphocytes (TIL) from tumor tissue or from immunocompromised individuals. Further, use of longer incubation times can increase the efficiency of capture of CD8+ T cells. Thus, by simply shortening or lengthening the time T cells are allowed to bind to the CD3/CD28 beads and/or by increasing or decreasing the ratio of beads to T cells (as described further herein), subpopulations of T cells can be preferentially selected for or against at culture initiation or at other time points during the process. Additionally, by increasing or decreasing the ratio of anti-CD3 and/or anti-CD28 antibodies on the beads or other surface, subpopulations of T cells can be preferentially selected for or against at culture initiation or at other desired time points. The skilled artisan would recognize that multiple rounds of selection can also be used in the context of this invention. In certain embodiments, it may be desirable to perform the selection procedure and use the “unselected” cells in the activation and expansion process. “Unselected” cells can also be subjected to further rounds of selection.

[0490] Enrichment of a T cell population by negative selection can be accomplished with a combination of antibodies directed to surface markers unique to the negatively selected cells. One method is cell sorting and/or selection via negative magnetic immunoadherence or flow cytometry that uses a cocktail of monoclonal antibodies directed to cell surface markers present on the cells negatively selected. For example, to enrich for CD4+ cells by negative selection, a monoclonal antibody cocktail typically includes antibodies to CD14, CD20, CD11b, CD16, HLA-DR, and CD8. In certain embodiments, it may be desirable to enrich for or positively select for regulatory T cells which typically express CD4+, CD25+, CD62Lhi, GITR+, and FoxP3+. In certain embodiments, it may be desirable to enrich for cells that are CD127low. Alternatively, in certain embodiments, T regulatory cells are depleted by anti-C25 conjugated beads or other similar method of selection.

[0491] The methods described herein can include, e.g., selection of a specific subpopulation of immune effector cells, e.g., T cells, that are a T regulatory cell-depleted population, CD25+ depleted cells, using, e.g., a negative selection technique, e.g., described herein. Preferably, the population of T regulatory depleted cells contains less than 30%, 25%, 20%, 15%, 10%, 5%, 4%, 3%, 2%, 1% of CD25+ cells.

[0492] In some embodiments, T regulatory cells, e.g., CD25+ T cells, are removed from the population using an anti-CD25 antibody, or fragment thereof, or a CD25-binding ligand, IL-2. In some embodiments, the anti-CD25 antibody, or fragment thereof, or CD25-binding ligand is conjugated to a substrate, e.g., a bead, or is otherwise coated on a substrate, e.g., a bead. In some embodiments, the anti-CD25 antibody, or fragment thereof, is conjugated to a substrate as described herein.

[0493] In some embodiments, the T regulatory cells, e.g., CD25+ T cells, are removed from the population using CD25 depletion reagent from Miltenyi™. In some embodiments, the ratio of cells to CD25 depletion reagent is 1e7 cells to 20 uL, or 1e7 cells to 15 uL, or 1e7 cells to 10 uL, or 1e7 cells to 5 uL, or 1e7 cells to 2.5 uL, or 1e7 cells to 1.25 uL. In some embodiments, e.g., for T regulatory cells, e.g., CD25+ depletion, greater than 500 million cells/ml is used. In some embodiments, a concentration of cells of 600, 700, 800, or 900 million cells/ml is used.

[0494] In some embodiments, the population of immune effector cells to be depleted includes about 6×10⁹ CD25+ T cells. In other embodiments, the population of immune effector cells to be depleted include about 1×10⁹ to 1×10¹⁰ CD25+ T cell, and any integer value in between. In some embodiments, the resulting population T regulatory depleted cells has 2×10⁹ T regulatory cells, e.g., CD25+ cells, or less (e.g., 1×10⁹, 5×10⁸, 1×10⁸, 5×10⁷, 1×10⁷, or less CD25+ cells).

[0495] In some embodiments, the T regulatory cells, e.g., CD25+ cells, are removed from the population using the CliniMAC system with a depletion tubing set, such as, e.g., tubing 162-01. In some embodiments, the CliniMAC system is run on a depletion setting such as, e.g., DEPLETION2.1.

[0496] Without wishing to be bound by a particular theory, decreasing the level of negative regulators of immune cells (e.g., decreasing the number of unwanted immune cells, e.g., T_{REG} cells), in a subject prior to apheresis or during manufacturing of a CAR-expressing cell product can reduce the risk of subject relapse. For example, methods of depleting T_{REG} cells are known in the art. Methods of decreasing T_{REG} cells include, but are not limited to, cyclophosphamide, anti-GITR antibody (an anti-GITR antibody described herein), CD25-depletion, and combinations thereof.

[0497] In some embodiments, the manufacturing methods comprise reducing the number of (e.g., depleting) T_{REG} cells prior to manufacturing of the CAR-expressing cell. For example, manufacturing methods comprise contacting the sample, e.g., the apheresis sample, with an anti-GITR antibody and/or an anti-CD25 antibody (or fragment thereof, or a CD25-binding ligand), e.g., to deplete T_{REG} cells prior to manufacturing of the CAR-expressing cell (e.g., T cell, NK cell) product.

[0498] In some embodiments, a subject is pre-treated with one or more therapies that reduce T_{REG} cells prior to collection of cells for CAR-expressing cell product manufacturing, thereby reducing the risk of subject relapse to CAR-expressing cell treatment. In some embodiments, methods of decreasing T_{REG} cells include, but are not limited to, administration to the subject of one or more of cyclophosphamide, anti-GITR antibody, CD25-depletion, or a combination thereof. Administration of one or more of cyclophosphamide, anti-GITR antibody, CD25-depletion, or a combination thereof, can occur before, during or after an infusion of the CAR-expressing cell product.

[0499] In some embodiments, a subject is pre-treated with cyclophosphamide prior to collection of cells for CAR IL-15R/IL-15-expressing cell product manufacturing, thereby reducing the risk of subject relapse to CAR IL-15R/IL-15-expressing cell treatment. In some embodiments, a subject is pre-treated with an anti-GITR antibody prior to collection of cells for CAR IL-15R/IL-15-expressing cell product manufacturing, thereby reducing the risk of subject relapse to CAR IL-15R/IL-15-expressing cell treatment.

[0500] In some embodiments, the population of cells to be removed are neither the regulatory T cells or tumor cells, but cells that otherwise negatively affect the expansion and/or function of CAR IL-15R/IL-15 T cells, e.g. cells expressing CD14, CD11b, CD33, CD15, or other markers expressed by potentially immune suppressive cells. In some embodiments, such cells are envisioned to be removed concurrently with regulatory T cells and/or tumor cells, or following said depletion, or in another order.

[0501] The methods described herein can include more than one selection step, e.g., more than one depletion step. Enrichment of a T cell population by negative selection can be accomplished, e.g., with a combination of antibodies directed to surface markers unique to the negatively selected cells. One method is cell sorting and/or selection via negative magnetic immunoadherence or flow cytometry that uses a cocktail of monoclonal antibodies directed to cell surface markers present on the cells negatively selected. For example, to enrich for CD4+ cells by negative selection, a monoclonal antibody cocktail can include antibodies to CD14, CD20, CD11b, CD16, HLA-DR, and CD8.

[0502] The methods described herein can further include removing cells from the population which express a tumor antigen, e.g., a tumor antigen that does not comprise CD25, e.g., CD19, CD30, CD38, CD123, CD20, CD14 or CD11b, to thereby provide a population of T regulatory depleted, e.g., CD25+ depleted, and tumor antigen depleted cells that are suitable for expression of a CAR, e.g., a CAR described herein. In some embodiments, tumor antigen expressing cells are removed simultaneously with the T regulatory, e.g., CD25+ cells. For example, an anti-CD25 antibody, or fragment thereof, and an anti-tumor antigen antibody, or fragment thereof, can be attached to the same substrate, e.g., bead, which can be used to remove the cells or an anti-CD25 antibody, or fragment thereof, or the anti-tumor antigen antibody, or fragment thereof, can be attached to separate beads, a mixture of which can be used to remove the cells. In other embodiments, the removal of T regulatory cells, e.g., CD25+ cells, and the removal of the tumor antigen expressing cells is sequential, and can occur, e.g., in either order.

[0503] Also provided are methods that include removing cells from the population which express a check point inhibitor, e.g., a check point inhibitor described herein, e.g., one or more of PD1+ cells, LAG3+ cells, and TIM3+ cells, to thereby provide a population of T regulatory depleted, e.g., CD25+ depleted cells, and check point inhibitor depleted cells, e.g., PD1+, LAG3+ and/or TIM3+ depleted cells. Exemplary check point inhibitors include PD1, PD-L1, PD-L2, CTLA4, TIM3, CEACAM (e.g., CEACAM-1, CEACAM-3 and/or CEACAM-5), LAG3, VISTA, BTLA, TIGIT, LAIR1, CD160, 2B4, CD80, CD86, B7-H3 (CD276), B7-H4 (VTCN1), HVEM (TNFRSF14 or CD270), KIR, A2aR, MHC class I, MHC class II, GALS, adenosine, and TGF beta. In embodiments, the checkpoint inhibitor is PD1 or PD-L1. In some embodiments, check point inhibitor expressing cells are removed simultaneously with the T regulatory, e.g., CD25+ cells. For example, an anti-CD25 antibody, or fragment thereof, and an anti-check point inhibitor antibody, or fragment thereof, can be attached to the same bead which can be used to remove the cells, or an anti-CD25 antibody, or fragment thereof, and the anti-check point inhibitor antibody, or fragment there, can be attached to separate beads, a mixture of which can be used to remove the cells. In other embodiments, the removal of T regulatory cells, e.g., CD25+ cells, and the removal of the check point inhibitor expressing cells is sequential, and can occur, e.g., in either order.

[0504] In some embodiments, a T cell population can be selected that expresses one or more of IFN-γ, TNFα, IL-17A, IL-2, IL-3, IL-4, GM-CSF, IL-10, IL-13, granzyme B, and perforin, or other appropriate molecules, e.g., other cytokines. Methods for screening for cell expression can be determined, e.g., by the methods described in PCT Publication No.: WO 2013/126712.

[0505] For isolation of a desired population of cells by positive or negative selection, the concentration of cells and surface (e.g., particles such as beads) can be varied. In certain embodiments, it may be desirable to significantly decrease the volume in which beads and cells are mixed together (e.g., increase the concentration of cells), to ensure maximum contact of cells and beads. For example, in some embodiments, a concentration of 2 billion cells/ml is used. In some embodiments, a concentration of 1 billion cells/ml is used. In some embodiments, greater than 100 million cells/ml is used. In some embodiments, a concentration of cells of 10, 15, 20, 25, 30, 35, 40, 45, or 50 million cells/ml is used. In yet some embodiments, a concentration of cells from 75, 80, 85, 90, 95, or 100 million cells/ml is used. In further embodiments, concentrations of 125 or 150 million cells/ml can be used. Using high concentrations can result in increased cell yield, cell activation, and cell expansion. Further, use of high cell concentrations allows more efficient capture of cells that may weakly express target antigens of interest, such as CD28-negative T cells, or from samples where there are many tumor cells present (e.g., leukemic blood, tumor tissue, etc.). Such populations of cells may have therapeutic value and would be desirable to obtain. For example, using high concentration of cells allows more efficient selection of CD8+ T cells that normally have weaker CD28 expression.

[0506] In some embodiments, it may be desirable to use lower concentrations of cells. By significantly diluting the mixture of T cells and surface (e.g., particles such as beads), interactions between the particles and cells is minimized. This selects for cells that express high amounts of desired antigens to be bound to the particles. For example, CD4+ T cells express higher levels of CD28 and are more efficiently captured than CD8+ T cells in dilute concentrations. In some embodiments, the concentration of cells used is 5×10e6/ml. In other embodiments, the concentration used can be from about 1×10⁵/ml to 1×10⁶/ml, and any integer value in between.

[0507] In other embodiments, the cells may be incubated on a rotator for varying lengths of time at varying speeds at either 2-10° C. or at room temperature.

[0508] T cells for stimulation can also be frozen after a washing step. Wishing not to be bound by theory, the freeze and subsequent thaw step provides a more uniform product by removing granulocytes and to some extent monocytes in the cell population. After the washing step that removes plasma and platelets, the cells may be suspended in a freezing solution. While many freezing solutions and parameters are known in the art and will be useful in this context, one method involves using PBS containing 20% DMSO and 8% human serum albumin, or culture media containing 10% Dextran 40 and 5% Dextrose, 20% Human Serum Albumin and 7.5% DMSO, or 31.25% Plasmalyte-A, 31.25% Dextrose 5%, 0.45% NaCl, 10% Dextran 40 and 5% Dextrose, 20% Human Serum Albumin, and 7.5% DMSO or other suitable cell freezing media containing for example, Hespan and PlasmaLyte A, the cells then are frozen to −80° C. at a rate of 1° per minute and stored in the vapor phase of a liquid nitrogen storage tank. Other methods of controlled freezing may be used as well as uncontrolled freezing immediately at −20° C. or in liquid nitrogen.

[0509] In certain embodiments, cryopreserved cells are thawed and washed as described herein and allowed to rest for one hour at room temperature prior to activation using the methods of the present invention.

[0510] Also contemplated in the context of the invention is the collection of blood samples or apheresis product from a subject at a time period prior to when the expanded cells as described herein might be needed. As such, the source of the cells to be expanded can be collected at any time point necessary, and desired cells, such as immune effector cells, e.g., T cells or NK cells, isolated and frozen for later use in cell therapy, e.g., T cell therapy, for any number of diseases or conditions that would benefit from cell therapy, e.g., T cell therapy, such as those described herein. In some embodiments a blood sample or an apheresis is taken from a generally healthy subject. In certain embodiments, a blood sample or an apheresis is taken from a generally healthy subject who is at risk of developing a disease, but who has not yet developed a disease, and the cells of interest are isolated and frozen for later use. In certain embodiments, the immune effector cells (e.g., T cells or NK cells) may be expanded, frozen, and used at a later time. In certain embodiments, samples are collected from a patient shortly after diagnosis of a particular disease as described herein but prior to any treatments. In some embodiments, the cells are isolated from a blood sample or an apheresis from a subject prior to any number of relevant treatment modalities, including but not limited to treatment with agents such as natalizumab, efalizumab, antiviral agents, chemotherapy, radiation, immunosuppressive agents, such as cyclosporin, azathioprine, methotrexate, mycophenolate, and FK506, antibodies, or other immunoablative agents such as CAMPATH, anti-CD3 antibodies, cytoxan, fludarabine, cyclosporin, FK506, rapamycin, mycophenolic acid, steroids, FR901228, and irradiation.

[0511] In some embodiments of the present invention, T cells are obtained from a patient directly following treatment that leaves the subject with functional T cells. In this regard, it has been observed that following certain cancer treatments, in particular treatments with drugs that damage the immune system, shortly after treatment during the period when patients would normally be recovering from the treatment, the quality of T cells obtained may be optimal or improved for their ability to expand ex vivo. Likewise, following ex vivo manipulation using the methods described herein, these cells may be in a preferred state for enhanced engraftment and in vivo expansion. Thus, it is contemplated within the context of the present invention to collect blood cells, including T cells, dendritic cells, or other cells of the hematopoietic lineage, during this recovery phase. Further, in certain embodiments, mobilization (for example, mobilization with GM-CSF) and conditioning regimens can be used to create a condition in a subject wherein repopulation, recirculation, regeneration, and/or expansion of particular cell types is favored, especially during a defined window of time following therapy. Illustrative cell types include T cells, B cells, dendritic cells, and other cells of the immune system.

[0512] In some embodiments, the immune effector cells expressing a TOX^{hi} CAR molecule, e.g., a TOX^{hi} CAR molecule described herein, are obtained from a subject that has received a low, immune enhancing dose of an mTOR inhibitor. In some embodiments, the population of immune effector cells, e.g., T cells, to be engineered to express a TOX^{hi} CAR, are harvested after a sufficient time, or after sufficient dosing of the low, immune enhancing, dose of an mTOR inhibitor, such that the level of PD1 negative immune effector cells, e.g., T cells, or the ratio of PD1 negative immune effector cells, e.g., T cells/PD1 positive immune effector cells, e.g., T cells, in the subject or harvested from the subject has been, at least transiently, increased.

[0513] In other embodiments, population of immune effector cells, e.g., T cells, which have, or will be engineered to express a TOX^{hi} CAR, can be treated ex vivo by contact with an amount of an mTOR inhibitor that increases the number of PD1 negative immune effector cells, e.g., T cells or increases the ratio of PD1 negative immune effector cells, e.g., T cells/PD1 positive immune effector cells, e.g., T cells.

[0514] In some embodiments, a T cell population is diaglycerol kinase (DGK)-deficient. DGK-deficient cells include cells that do not express DGK RNA or protein, or have reduced or inhibited DGK activity. DGK-deficient cells can be generated by genetic approaches, e.g., administering RNA-interfering agents, e.g., siRNA, shRNA, miRNA, to reduce or prevent DGK expression. Alternatively, DGK-deficient cells can be generated by treatment with DGK inhibitors described herein.

[0515] In some embodiments, a T cell population is Ikaros-deficient. Ikaros-deficient cells include cells that do not express Ikaros RNA or protein, or have reduced or inhibited Ikaros activity, Ikaros-deficient cells can be generated by genetic approaches, e.g., administering RNA-interfering agents, e.g., siRNA, shRNA, miRNA, to reduce or prevent Ikaros expression. Alternatively, Ikaros-deficient cells can be generated by treatment with Ikaros inhibitors, e.g., lenalidomide.

[0516] In embodiments, a T cell population is DGK-deficient and Ikaros-deficient, e.g., does not express DGK and Ikaros, or has reduced or inhibited DGK and Ikaros activity. Such DGK and Ikaros-deficient cells can be generated by any of the methods described herein.

[0517] In some embodiments, the NK cells are obtained from the subject. In some embodiments, the NK cells are an NK cell line, e.g., NK-92 cell line (Conkwest).

### Modifications of CAR Cells, Including Allogeneic CAR Cells

[0518] In embodiments described herein, the immune effector cell can be an allogeneic immune effector cell, e.g., T cell or NK cell. For example, the cell can be an allogeneic T cell, e.g., an allogeneic T cell lacking expression of a functional T cell receptor (TCR) and/or human leukocyte antigen (HLA), e.g., HLA class I and/or HLA class II, and/or beta-2 microglobulin ((32m). Compositions of allogeneic CAR and methods thereof have been described in, e.g., pages 227-237 of WO 2016/014565, incorporated herein by reference in its entirety.

[0519] In some embodiments, a cell, e.g., a T cell or a NK cell, is modified to reduce the expression of a TCR, and/or HLA, and/or β₂m, and/or an inhibitory molecule described herein (e.g., PD1, PD-L1, PD-L2, CTLA4, TIM3, CEACAM (e.g., CEACAM-1, CEACAM-3 and/or CEACAM-5), LAGS, VISTA, BTLA, TIGIT, LAIR1, CD160, 2B4, CD80, CD86, B7-H3 (CD276), B7-H4 (VTCN1), HVEM (TNFRSF14 or CD270), KIR, A2aR, MHC class I, MHC class II, GALS, adenosine, and TGF beta), using, e.g., a method described herein, e.g., siRNA, shRNA, clustered regularly interspaced short palindromic repeats (CRISPR) transcription-activator like effector nuclease (TALEN), or zinc finger endonuclease (ZFN).

[0520] In some embodiments, a cell, e.g., a T cell or a NK cell is engineered to express a telomerase subunit, e.g., the catalytic subunit of telomerase, e.g., TERT, e.g., hTERT. In some embodiments, such modification improves persistence of the cell in a patient.

### Activation and Expansion of T Cells

[0521] T cells may be activated and expanded generally using methods as described, for example, in U.S. Pat. Nos. 6,352,694; 6,534,055; 6,905,680; 6,692,964; 5,858,358; 6,887,466; 6,905,681; 7,144,575; 7,067,318; 7,172,869; 7,232,566; 7,175,843; 5,883,223; 6,905,874; 6,797,514; 6,867,041; and U.S. Patent Application Publication No. 20060121005.

[0522] Generally, the T cells of the invention may be expanded by contact with a surface having attached thereto an agent that stimulates a CD3/TCR complex associated signal and a ligand that stimulates a costimulatory molecule on the surface of the T cells. In particular, T cell populations may be stimulated as described herein, such as by contact with an anti-CD3 antibody, or antigen-binding fragment thereof, or an anti-CD2 antibody immobilized on a surface, or by contact with a protein kinase C activator (e.g., bryostatin) in conjunction with a calcium ionophore. For co-stimulation of an accessory molecule on the surface of the T cells, a ligand that binds the accessory molecule is used. For example, a population of T cells can be contacted with an anti-CD3 antibody and an anti-CD28 antibody, under conditions appropriate for stimulating proliferation of the T cells. To stimulate proliferation of either CD4+ T cells or CD8+ T cells, an anti-CD3 antibody and an anti-CD28 antibody can be used. Examples of an anti-CD28 antibody include 9.3, B-T3, XR-CD28 (Diaclone, Besancon, France) can be used as can other methods commonly known in the art (Berg et al., Transplant Proc. 30(8):3975-3977, 1998; Haanen et al., J. Exp. Med. 190(9):13191328, 1999; Garland et al., J. Immunol Meth. 227(1-2):53-63, 1999).

[0523] In certain embodiments, the primary stimulatory signal and the costimulatory signal for the T cell may be provided by different protocols. For example, the agents providing each signal may be in solution or coupled to a surface. When coupled to a surface, the agents may be coupled to the same surface (i.e., in “cis” formation) or to separate surfaces (i.e., in “trans” formation). Alternatively, one agent may be coupled to a surface and the other agent in solution. In some embodiments, the agent providing the costimulatory signal is bound to a cell surface and the agent providing the primary activation signal is in solution or coupled to a surface. In certain embodiments, both agents can be in solution. In some embodiments, the agents may be in soluble form, and then cross-linked to a surface, such as a cell expressing Fc receptors or an antibody or other binding agent which will bind to the agents. In this regard, see for example, U.S. Patent Application Publication Nos. 20040101519 and 20060034810 for artificial antigen presenting cells (aAPCs) that are contemplated for use in activating and expanding T cells in the present invention.

[0524] In some embodiments, the two agents are immobilized on beads, either on the same bead, i.e., “cis,” or to separate beads, i.e., “trans.” By way of example, the agent providing the primary activation signal is an anti-CD3 antibody or an antigen-binding fragment thereof and the agent providing the costimulatory signal is an anti-CD28 antibody or antigen-binding fragment thereof; and both agents are co-immobilized to the same bead in equivalent molecular amounts. In some embodiments, a 1:1 ratio of each antibody bound to the beads for CD4+ T cell expansion and T cell growth is used. In certain embodiments of the present invention, a ratio of anti CD3:CD28 antibodies bound to the beads is used such that an increase in T cell expansion is observed as compared to the expansion observed using a ratio of 1:1. In some embodiments an increase of from about 1 to about 3 fold is observed as compared to the expansion observed using a ratio of 1:1. In some embodiments, the ratio of CD3:CD28 antibody bound to the beads ranges from 100:1 to 1:100 and all integer values there between. In some embodiments of the present invention, more anti-CD28 antibody is bound to the particles than anti-CD3 antibody, i.e., the ratio of CD3:CD28 is less than one. In certain embodiments of the invention, the ratio of anti CD28 antibody to anti CD3 antibody bound to the beads is greater than 2:1. In some embodiments, a 1:100 CD3:CD28 ratio of antibody bound to beads is used. In some embodiments, a 1:75 CD3:CD28 ratio of antibody bound to beads is used. In some embodiments, a 1:50 CD3:CD28 ratio of antibody bound to beads is used. In some embodiments, a 1:30 CD3:CD28 ratio of antibody bound to beads is used. In some embodiments, a 1:10 CD3:CD28 ratio of antibody bound to beads is used. In some embodiments, a 1:3 CD3:CD28 ratio of antibody bound to the beads is used. In yet some embodiments, a 3:1 CD3:CD28 ratio of antibody bound to the beads is used.

[0525] Ratios of particles to cells from 1:500 to 500:1 and any integer values in between may be used to stimulate T cells or other target cells. As those of ordinary skill in the art can readily appreciate, the ratio of particles to cells may depend on particle size relative to the target cell. For example, small sized beads could only bind a few cells, while larger beads could bind many. In certain embodiments the ratio of cells to particles ranges from 1:100 to 100:1 and any integer values in-between and in further embodiments the ratio comprises 1:9 to 9:1 and any integer values in between, can also be used to stimulate T cells. The ratio of anti-CD3- and anti-CD28-coupled particles to T cells that result in T cell stimulation can vary as noted above, however certain preferred values include 1:100, 1:50, 1:40, 1:30, 1:20, 1:10, 1:9, 1:8, 1:7, 1:6, 1:5, 1:4, 1:3, 1:2, 1:1, 2:1, 3:1, 4:1, 5:1, 6:1, 7:1, 8:1, 9:1, 10:1, and 15:1 with one preferred ratio being at least 1:1 particles per T cell. In some embodiments, a ratio of particles to cells of 1:1 or less is used. In some embodiments, a preferred particle: cell ratio is 1:5. In further embodiments, the ratio of particles to cells can be varied depending on the day of stimulation. For example, in some embodiments, the ratio of particles to cells is from 1:1 to 10:1 on the first day and additional particles are added to the cells every day or every other day thereafter for up to 10 days, at final ratios of from 1:1 to 1:10 (based on cell counts on the day of addition). In some embodiments, the ratio of particles to cells is 1:1 on the first day of stimulation and adjusted to 1:5 on the third and fifth days of stimulation. In some embodiments, particles are added on a daily or every other day basis to a final ratio of 1:1 on the first day, and 1:5 on the third and fifth days of stimulation. In some embodiments, the ratio of particles to cells is 2:1 on the first day of stimulation and adjusted to 1:10 on the third and fifth days of stimulation. In some embodiments, particles are added on a daily or every other day basis to a final ratio of 1:1 on the first day, and 1:10 on the third and fifth days of stimulation. One of skill in the art will appreciate that a variety of other ratios may be suitable for use in the present invention. In particular, ratios will vary depending on particle size and on cell size and type. In some embodiments, the most typical ratios for use are in the neighborhood of 1:1, 2:1 and 3:1 on the first day.

[0526] In further embodiments of the present invention, the cells, such as T cells, are combined with agent-coated beads, the beads and the cells are subsequently separated, and then the cells are cultured. In some embodiments, prior to culture, the agent-coated beads and cells are not separated but are cultured together. In some embodiments, the beads and cells are first concentrated by application of a force, such as a magnetic force, resulting in increased ligation of cell surface markers, thereby inducing cell stimulation.

[0527] By way of example, cell surface proteins may be ligated by allowing paramagnetic beads to which anti-CD3 and anti-CD28 are attached (3×28 beads) to contact the T cells. In some embodiments the cells (for example, 10⁴ to 10⁹ T cells) and beads (for example, DYNABEADS® M-450 CD3/CD28 T paramagnetic beads at a ratio of 1:1) are combined in a buffer, for example PBS (without divalent cations such as, calcium and magnesium). Again, those of ordinary skill in the art can readily appreciate any cell concentration may be used. For example, the target cell may be very rare in the sample and comprise only 0.01% of the sample or the entire sample (i.e., 100%) may comprise the target cell of interest. Accordingly, any cell number is within the context of the present invention. In certain embodiments, it may be desirable to significantly decrease the volume in which particles and cells are mixed together (i.e., increase the concentration of cells), to ensure maximum contact of cells and particles. For example, in some embodiments, a concentration of about 10 billion cells/ml, 9 billion/ml, 8 billion/ml, 7 billion/ml, 6 billion/ml, 5 billion/ml, or 2 billion cells/ml is used. In some embodiments, greater than 100 million cells/ml is used. In some embodiments, a concentration of cells of 10, 15, 20, 25, 30, 35, 40, 45, or 50 million cells/ml is used. In yet some embodiments, a concentration of cells from 75, 80, 85, 90, 95, or 100 million cells/ml is used. In further embodiments, concentrations of 125 or 150 million cells/ml can be used. Using high concentrations can result in increased cell yield, cell activation, and cell expansion. Further, use of high cell concentrations allows more efficient capture of cells that may weakly express target antigens of interest, such as CD28-negative T cells. Such populations of cells may have therapeutic value and would be desirable to obtain in certain embodiments. For example, using high concentration of cells allows more efficient selection of CD8+ T cells that normally have weaker CD28 expression.

[0528] In some embodiments, cells transduced with a nucleic acid encoding a TOX^{hi} CAR, e.g., a TOX^{hi} CAR described herein, are expanded, e.g., by a method described herein. In some embodiments, the cells are expanded in culture for a period of several hours (e.g., about 2, 3, 4, 5, 6, 7, 8, 9, 10, 15, 18, 21 hours) to about 14 days (e.g., 1, 2, 3, 4, 5, 6, 7, 8, 9, 10, 11, 12, 13 or 14 days). In some embodiments, the cells are expanded for a period of 4 to 9 days. In some embodiments, the cells are expanded for a period of 8 days or less, e.g., 7, 6 or 5 days. In some embodiments, the cells, e.g., a TOX^{hi} CAR expressing cell described herein, are expanded in culture for 5 days, and the resulting cells are more potent than the same cells expanded in culture for 9 days under the same culture conditions. Potency can be defined, e.g., by various T cell functions, e.g. proliferation, target cell killing, cytokine production, activation, migration, or combinations thereof. In some embodiments, the cells, e.g., a TOX^{hi} CAR expressing cell described herein, expanded for 5 days show at least a one, two, three or four fold increase in cells doublings upon antigen stimulation as compared to the same cells expanded in culture for 9 days under the same culture conditions. In some embodiments, the cells, e.g., the cells expressing a TOX^{hi} CAR described herein, are expanded in culture for 5 days, and the resulting cells exhibit higher proinflammatory cytokine production, e.g., IFN-γ and/or GM-CSF levels, as compared to the same cells expanded in culture for 9 days under the same culture conditions. In some embodiments, the cells, e.g., a TOX^{hi} CAR expressing cell described herein, expanded for 5 days show at least a one, two, three, four, five, ten fold or more increase in pg/ml of proinflammatory cytokine production, e.g., IFN-γ and/or GM-CSF levels, as compared to the same cells expanded in culture for 9 days under the same culture conditions.

[0529] In some embodiments of the present invention, the mixture may be cultured for several hours (about 3 hours) to about 14 days or any hourly integer value in between. In some embodiments, the mixture may be cultured for 21 days. In some embodiments of the invention the beads and the T cells are cultured together for about eight days. In some embodiments, the beads and T cells are cultured together for 2-3 days. Several cycles of stimulation may also be desired such that culture time of T cells can be 60 days or more. Conditions appropriate for T cell culture include an appropriate media (e.g., Minimal Essential Media or RPMI Media 1640 or, X-vivo 15, (Lonza)) that may contain factors necessary for proliferation and viability, including serum (e.g., fetal bovine or human serum), interleukin-2 (IL-2), insulin, IFN-γ, IL-4, IL-7, GM-CSF, IL-10, IL-12, IL-15, TGFβ, and TNF-α or any other additives for the growth of cells known to the skilled artisan. Other additives for the growth of cells include, but are not limited to, surfactant, plasmanate, and reducing agents such as N-acetyl-cysteine and 2-mercaptoethanol. Media can include RPMI 1640, AIM-V, DMEM, MEM, α-MEM, F-12, X-Vivo 15, and X-Vivo 20, Optimizer, with added amino acids, sodium pyruvate, and vitamins, either serum-free or supplemented with an appropriate amount of serum (or plasma) or a defined set of hormones, and/or an amount of cytokine(s) sufficient for the growth and expansion of T cells. Antibiotics, e.g., penicillin and streptomycin, are included only in experimental cultures, not in cultures of cells that are to be infused into a subject. The target cells are maintained under conditions necessary to support growth, for example, an appropriate temperature (e.g., 37° C.) and atmosphere (e.g., air plus 5% CO₂).

[0530] In some embodiments, the cells are expanded in an appropriate media (e.g., media described herein) that includes one or more interleukin that result in at least a 200-fold (e.g., 200-fold, 250-fold, 300-fold, 350-fold) increase in cells over a 14 day expansion period, e.g., as measured by a method described herein such as flow cytometry. In some embodiments, the cells are expanded in the presence of IL-15 and/or IL-7 (e.g., IL-15 and IL-7).

[0531] In embodiments, methods described herein, e.g., TOX^{hi} CAR-expressing cell manufacturing methods, comprise removing T regulatory cells, e.g., CD25+ T cells, from a cell population, e.g., using an anti-CD25 antibody, or fragment thereof, or a CD25-binding ligand, IL-2. Methods of removing T regulatory cells, e.g., CD25+ T cells, from a cell population are described herein. In embodiments, the methods, e.g., manufacturing methods, further comprise contacting a cell population (e.g., a cell population in which T regulatory cells, such as CD25+ T cells, have been depleted; or a cell population that has previously contacted an anti-CD25 antibody, fragment thereof, or CD25-binding ligand) with IL-15 and/or IL-7. For example, the cell population (e.g., that has previously contacted an anti-CD25 antibody, fragment thereof, or CD25-binding ligand) is expanded in the presence of IL-15 and/or IL-7.

[0532] In some embodiments a TOX^{hi} CAR-expressing cell described herein is contacted with a composition comprising a interleukin-15 (IL-15) polypeptide, a interleukin-15 receptor alpha (IL-15Ra) polypeptide, or a combination of both a IL-15 polypeptide and a IL-15Ra polypeptide e.g., hetIL-15, during the manufacturing of the CAR-expressing cell, e.g., ex vivo. In embodiments, a CAR-expressing cell described herein is contacted with a composition comprising a IL-15 polypeptide during the manufacturing of the CAR-expressing cell, e.g., ex vivo. In embodiments, a CAR-expressing cell described herein is contacted with a composition comprising a combination of both a IL-15 polypeptide and a IL-15 Ra polypeptide during the manufacturing of the CAR-expressing cell, e.g., ex vivo. In embodiments, a CAR-expressing cell described herein is contacted with a composition comprising hetIL-15 during the manufacturing of the CAR-expressing cell, e.g., ex vivo.

[0533] In some embodiments the TOX^{hi} CAR-expressing cell described herein is contacted with a composition comprising hetIL-15 during ex vivo expansion. In some embodiments, the CAR-expressing cell described herein is contacted with a composition comprising an IL-15 polypeptide during ex vivo expansion. In some embodiments, the CAR-expressing cell described herein is contacted with a composition comprising both an IL-15 polypeptide and an IL-15Ra polypeptide during ex vivo expansion. In some embodiments the contacting results in the survival and proliferation of a lymphocyte subpopulation, e.g., CD8+ T cells.

[0534] T cells that have been exposed to varied stimulation times may exhibit different characteristics. For example, typical blood or apheresed peripheral blood mononuclear cell products have a helper T cell population (TH, CD4+) that is greater than the cytotoxic or suppressor T cell population. Ex vivo expansion of T cells by stimulating CD3 and CD28 receptors produces a population of T cells that prior to about days 8-9 consists predominately of TH cells, while after about days 8-9, the population of T cells comprises an increasingly greater population of TC cells. Accordingly, depending on the purpose of treatment, infusing a subject with a T cell population comprising predominately of TH cells may be advantageous. Similarly, if an antigen-specific subset of TC cells has been isolated it may be beneficial to expand this subset to a greater degree.

[0535] Further, in addition to CD4 and CD8 markers, other phenotypic markers vary significantly, but in large part, reproducibly during the course of the cell expansion process. Thus, such reproducibility enables the ability to tailor an activated T cell product for specific purposes.

[0536] Once a TOX^{hi} CAR is constructed, various assays can be used to evaluate the activity of the molecule, such as but not limited to, the ability to expand T cells following antigen stimulation, sustain T cell expansion in the absence of re-stimulation, and anti-cancer activities in appropriate in vitro and animal models. Assays to evaluate the effects of a TOX^{hi} CAR are described in further detail below.

[0537] Western blot analysis of CAR expression in primary T cells can be used to detect the presence of monomers and dimers. See, e.g., Milone et al., Molecular Therapy 17(8): 1453-1464 (2009). Very briefly, T cells (1:1 mixture of CD4+ and CD8+ T cells) expressing the CARs are expanded in vitro for more than 10 days followed by lysis and SDS-PAGE under reducing conditions. CARs containing the full length TCR-ζ cytoplasmic domain and the endogenous TCR-ζ chain are detected by western blotting using an antibody to the TCR-ζ chain. The same T cell subsets are used for SDS-PAGE analysis under non-reducing conditions to permit evaluation of covalent dimer formation.

[0538] In vitro expansion of TOX^{hi} CAR T cells following antigen stimulation can be measured by flow cytometry. For example, a mixture of CD4⁺ and CD8⁺ T cells are stimulated with αCD3/αCD28 aAPCs followed by transduction with lentiviral vectors expressing GFP under the control of the promoters to be analyzed. Exemplary promoters include the CMV IE gene, EF-1α, ubiquitin C, or phosphoglycerokinase (PGK) promoters. GFP fluorescence is evaluated on day 6 of culture in the CD4⁺ and/or CD8⁺ T cell subsets by flow cytometry. See, e.g., Milone et al., Molecular Therapy 17(8): 1453-1464 (2009). Alternatively, a mixture of CD4⁺ and CD8⁺ T cells are stimulated with αCD3/αCD28 coated magnetic beads on day 0, and transduced with the CAR on day 1 using a multicistronic lentiviral vector expressing the CAR along with eGFP using a 2A ribosomal skipping sequence. Cultures are re-stimulated with antigen-expressing cells, such as multiple myeloma cell lines or K562 expressing the antigen, following washing. Exogenous IL-2 is added to the cultures every other day at 100 IU/ml. GFP⁺ T cells are enumerated by flow cytometry using bead-based counting. See, e.g., Milone et al., Molecular Therapy 17(8): 1453-1464 (2009).

[0539] Sustained CAR⁺ T cell expansion in the absence of re-stimulation can also be measured. See, e.g., Milone et al., Molecular Therapy 17(8): 1453-1464 (2009). Briefly, mean T cell volume (fl) is measured on day 8 of culture using a Coulter Multisizer III particle counter, a Nexcelom Cellometer Vision or Millipore Scepter, following stimulation with αCD3/αCD28 coated magnetic beads on day 0, and transduction with the indicated CAR on day 1.

[0540] Animal models can also be used to measure a CART activity. For example, xenograft model using human antigen-specific CAR⁺ T cells to treat a primary human multiple myeloma in immunodeficient mice can be used. See, e.g., Milone et al., Molecular Therapy 17(8): 1453-1464 (2009). Very briefly, after establishment of MM, mice are randomized as to treatment groups. Different numbers of TOX^{hi} CAR T cells can be injected into immunodeficient mice bearing MM. Animals are assessed for disease progression and tumor burden at weekly intervals. Survival curves for the groups are compared using the log-rank test. In addition, absolute peripheral blood CD4⁺ and CD8⁺ T cell counts 4 weeks following T cell injection in the immunodeficient mice can also be analyzed. Mice are injected with multiple myeloma cells and 3 weeks later are injected with T cells engineered to express a TOX^{hi} CAR, e.g., by a multicistronic lentiviral vector that encodes the CAR and the TOX2 protein or TOX2 modulator, linked to eGFP. T cells are normalized to 45-50% input GFP T cells by mixing with mock-transduced cells prior to injection, and confirmed by flow cytometry. Animals are assessed for leukemia at 1-week intervals. Survival curves for the TOX^{hi} CAR T cell groups are compared using the log-rank test.

[0541] Assessment of cell proliferation and cytokine production has been previously described, e.g., at Milone et al., Molecular Therapy 17(8): 1453-1464 (2009). Briefly, assessment of CAR IL-15R/IL-15-mediated proliferation is performed in microtiter plates by mixing washed T cells with K562 cells expressing the antigen or other antigen-expressing myeloma cells are irradiated with gamma-radiation prior to use. Anti-CD3 (clone OKT3) and anti-CD28 (clone 9.3) monoclonal antibodies are added to cultures with KT32-BBL cells to serve as a positive control for stimulating T-cell proliferation since these signals support long-term CD8⁺ T cell expansion ex vivo. T cells are enumerated in cultures using CountBright™ fluorescent beads (Invitrogen, Carlsbad, Calif.) and flow cytometry as described by the manufacturer. TOX^{hi} CAR T cells are identified by GFP expression using T cells that are engineered with eGFP-2A linked CAR-expressing lentiviral vectors. For CAR positive T cells not expressing GFP, the CAR+ T cells are detected with biotinylated recombinant antigen protein and a secondary avidin-PE conjugate. CD4+ and CD8⁺ expression on T cells are also simultaneously detected with specific monoclonal antibodies (BD Biosciences). Cytokine measurements are performed on supernatants collected 24 hours following re-stimulation using the human TH1/TH2 cytokine cytometric bead array kit (BD Biosciences, San Diego, Calif.) according the manufacturer's instructions. Fluorescence is assessed using a FACScalibur flow cytometer, and data is analyzed according to the manufacturer's instructions.

[0542] Cytotoxicity can be assessed by a standard 51Cr-release assay. See, e.g., Milone et al., Molecular Therapy 17(8): 1453-1464 (2009). Briefly, target cells (e.g., K562 lines expressing the antigen and primary multiple myeloma cells) are loaded with 51Cr (as NaCrO4, New England Nuclear, Boston, Mass.) at 37° C. for 2 hours with frequent agitation, washed twice in complete RPMI and plated into microtiter plates. Effector T cells are mixed with target cells in the wells in complete RPMI at varying ratios of effector cell:target cell (E:T). Additional wells containing media only (spontaneous release, SR) or a 1% solution of triton-X 100 detergent (total release, TR) are also prepared. After 4 hours of incubation at 37° C., supernatant from each well is harvested. Released 51Cr is then measured using a gamma particle counter (Packard Instrument Co., Waltham, Mass.). Each condition is performed in at least triplicate, and the percentage of lysis is calculated using the formula: % Lysis=(ER−SR)/(TR−SR), where ER represents the average 51Cr released for each experimental condition. Alternatively, cytotoxicity can also be assessed using a Bright-Glo™ Luciferase Assay.

[0543] Imaging technologies can be used to evaluate specific trafficking and proliferation of TOX^{hi} CAR expressing cells in tumor-bearing animal models. Such assays have been described, for example, in Barrett et al., Human Gene Therapy 22:1575-1586 (2011). Briefly, NOD/SCID/γc^{-/-} (NSG) mice or other immunodeficient are injected IV with multiple myeloma cells followed 7 days later with CART cells 4 hour after electroporation with the CAR or TOX^{hi} CAR constructs. The T cells are stably transfected with a lentiviral construct to express firefly luciferase, and mice are imaged for bioluminescence. Alternatively, therapeutic efficacy and specificity of a single injection of CAR⁺ T cells in a multiple myeloma xenograft model can be measured as the following: NSG mice are injected with multiple myeloma cells transduced to stably express firefly luciferase, followed by a single tail-vein injection of T cells electroporated with CAR construct days later. Animals are imaged at various time points post injection. For example, photon-density heat maps of firefly luciferase positive tumors in representative mice at day 5 (2 days before treatment) and day 8 (24 hr post CARP PBLs) can be generated.

[0544] Alternatively, or in combination to the methods disclosed herein, methods and compositions for one or more of: detection and/or quantification of TOX^{hi} CAR cells (e.g., in vitro or in vivo (e.g., clinical monitoring)); immune cell expansion and/or activation; and/or CAR-specific selection, that involve the use of a CAR ligand, are disclosed. In some embodiments, the CAR ligand is an antibody that binds to the CAR molecule, e.g., binds to the extracellular antigen binding domain of CAR (e.g., an antibody that binds to the antigen binding domain, e.g., an anti-idiotypic antibody; or an antibody that binds to a constant region of the extracellular binding domain). In other embodiments, the CAR ligand is a CAR antigen molecule (e.g., a CAR antigen molecule as described herein).

[0545] In some embodiments, a method for detecting and/or quantifying TOX^{hi} CAR expressing cells is disclosed. For example, the CAR ligand can be used to detect and/or quantify TOX^{hi} CAR cells in vitro or in vivo (e.g., clinical monitoring of CAR-expressing cells in a patient, or dosing a patient). The method includes:

[0546] providing the CAR ligand (optionally, a labelled CAR ligand, e.g., a CAR ligand that includes a tag, a bead, a radioactive or fluorescent label);

[0547] acquiring the TOX^{hi} CAR-expressing cell (e.g., acquiring a sample containing TOX^{hi} CAR cells, such as a manufacturing sample or a clinical sample);

[0548] contacting the TOX^{hi} CAR-expressing cell with the CAR ligand under conditions where binding occurs, thereby detecting the level (e.g., amount) of the CAR-expressing cells present. Binding of the TOX^{hi} CAR-expressing cell with the CAR ligand can be detected using standard techniques such as FACS, ELISA and the like.

[0549] In some embodiments, a method of expanding and/or activating cells (e.g., immune effector cells) is disclosed. The method includes:

[0550] providing a TOX^{hi} CAR-expressing cell (e.g., a first modified TOX^{hi} CAR-expressing cell or a transiently expressing CAR cell);

[0551] contacting said TOX^{hi} CAR-expressing cell with a CAR ligand, e.g., a CAR ligand as described herein), under conditions where immune cell expansion and/or proliferation occurs, thereby producing the activated and/or expanded cell population.

[0552] In some embodiments, the CAR ligand is present on (e.g., is immobilized or attached to a substrate, e.g., a non-naturally occurring substrate). In some embodiments, the substrate is a non-cellular substrate. The non-cellular substrate can be a solid support chosen from, e.g., a plate (e.g., a microtiter plate), a membrane (e.g., a nitrocellulose membrane), a matrix, a chip or a bead. In embodiments, the CAR ligand is present in the substrate (e.g., on the substrate surface). The CAR ligand can be immobilized, attached, or associated covalently or non-covalently (e.g., cross-linked) to the substrate. In some embodiments, the CAR ligand is attached (e.g., covalently attached) to a bead. In the aforesaid embodiments, the immune cell population can be expanded in vitro or ex vivo. The method can further include culturing the population of immune cells in the presence of the ligand of the CAR molecule, e.g., using any of the methods described herein.

[0553] In other embodiments, the method of expanding and/or activating the cells further comprises addition of a second stimulatory molecule, e.g., CD28. For example, the CAR ligand and the second stimulatory molecule can be immobilized to a substrate, e.g., one or more beads, thereby providing increased cell expansion and/or activation.

[0554] In yet some embodiments, a method for selecting or enriching for a TOX^{hi} CAR expressing cell is provided. The method includes contacting the TOX^{hi} CAR expressing cell with a CAR ligand as described herein; and selecting the cell on the basis of binding of the CAR ligand.

[0555] In yet other embodiments, a method for depleting, reducing and/or killing a CAR expressing cell is provided. The method includes contacting the TOX^{hi} CAR expressing cell with a CAR ligand as described herein; and targeting the cell on the basis of binding of the CAR ligand, thereby reducing the number, and/or killing, the TOX^{hi} CAR-expressing cell. In some embodiments, the CAR ligand is coupled to a toxic agent (e.g., a toxin or a cell ablative drug). In some embodiments, the anti-idiotypic antibody can cause effector cell activity, e.g., ADCC or ADC activities.

[0556] Exemplary anti-CAR antibodies that can be used in the methods disclosed herein are described, e.g., in WO 2014/190273 and by Jena et al., “Chimeric Antigen Receptor (CAR)-Specific Monoclonal Antibody to Detect CD19-Specific T cells in Clinical Trials”, PLOS March 2013 8:3 e57838, the contents of which are incorporated by reference. In some embodiments, the anti-idiotypic antibody molecule recognizes an anti-CD19 antibody molecule, e.g., an anti-CD19 scFv. For instance, the anti-idiotypic antibody molecule can compete for binding with the CD19-specific CAR mAb clone no. 136.20.1 described in Jena et al., PLOS March 2013 8:3 e57838; may have the same CDRs (e.g., one or more of, e.g., all of, VH CDR1, VH CDR2, CH CDR3, VL CDR1, VL CDR2, and VL CDR3, using the Kabat definition, the Chothia definition, or a combination of the Kabat and Chothia definitions) as the CD19-specific CAR mAb clone no. 136.20.1; may have one or more (e.g., 2) variable regions as the CD19-specific CAR mAb clone no. 136.20.1, or may comprise the CD19-specific CAR mAb clone no. 136.20.1. In some embodiments, the anti-idiotypic antibody was made according to a method described in Jena et al. In some embodiments, the anti-idiotypic antibody molecule is an anti-idiotypic antibody molecule described in WO 2014/190273. In some embodiments, the anti-idiotypic antibody molecule has the same CDRs (e.g., one or more of, e.g., all of, VH CDR1, VH CDR2, CH CDR3, VL CDR1, VL CDR2, and VL CDR3) as an antibody molecule of WO 2014/190273 such as 136.20.1; may have one or more (e.g., 2) variable regions of an antibody molecule of WO 2014/190273, or may comprise an antibody molecule of WO 2014/190273 such as 136.20.1. In other embodiments, the anti-CAR antibody binds to a constant region of the extracellular binding domain of the CAR molecule, e.g., as described in WO 2014/190273. In some embodiments, the anti-CAR antibody binds to a constant region of the extracellular binding domain of the CAR molecule, e.g., a heavy chain constant region (e.g., a CH2-CH3 hinge region) or light chain constant region. For instance, in some embodiments the anti-CAR antibody competes for binding with the 2D3 monoclonal antibody described in WO 2014/190273, has the same CDRs (e.g., one or more of, e.g., all of, VH CDR1, VH CDR2, CH CDR3, VL CDR1, VL CDR2, and VL CDR3) as 2D3, or has one or more (e.g., 2) variable regions of 2D3, or comprises 2D3 as described in WO 2014/190273.

[0557] In some embodiments and embodiments, the compositions and methods herein are optimized for a specific subset of T cells, e.g., as described in U.S. Ser. No. 62/031,699 filed Jul. 31, 2014, the contents of which are incorporated herein by reference in their entirety. In some embodiments, the optimized subsets of T cells display an enhanced persistence compared to a control T cell, e.g., a T cell of a different type (e.g., CD8⁺ or CD4⁺) expressing the same construct.

[0558] In some embodiments, a CD4⁺ T cell comprises a TOX^{hi} CAR described herein, which TOX^{hi} CAR comprises an intracellular signaling domain suitable for (e.g., optimized for, e.g., leading to enhanced persistence in) a CD4⁺ T cell, e.g., an ICOS domain. In some embodiments, a CD8⁺ T cell comprises a TOX^{hi} CAR described herein, which TOX^{hi} CAR comprises an intracellular signaling domain suitable for (e.g., optimized for, e.g., leading to enhanced persistence of) a CD8⁺ T cell, e.g., a 4-1BB domain, a CD28 domain, or another costimulatory domain other than an ICOS domain.

[0559] In some embodiments, described herein is a method of treating a subject, e.g., a subject having cancer. The method includes administering to said subject, an effective amount of:

[0560] 1) a CD4⁺ T cell comprising a TOX^{hi} CAR (the CAR^{CD4+})

[0561] comprising:

[0562] an antigen binding domain, e.g., an antigen binding domain described herein;

[0563] a transmembrane domain; and

[0564] an intracellular signaling domain, e.g., a first costimulatory domain, e.g., an ICOS domain; and

[0565] 2) a CD8⁺ T cell comprising a TOX^{hi} CAR (the CAR^{CD8+}) comprising:

[0566] an antigen binding domain, e.g., an antigen binding domain described herein;

[0567] a transmembrane domain; and

[0568] an intracellular signaling domain, e.g., a second co stimulatory domain, e.g., a 4-1BB domain, a CD28 domain, or another costimulatory domain other than an ICOS domain;

[0569] wherein the CAR^{CD4+} and the CAR^{CD8+} differ from one another.

[0570] Optionally, the method further includes administering:

[0571] 3) a second CD8+ T cell comprising a TOX^{hi} CAR (the second CAR^{CD8+}) comprising:

[0572] an antigen binding domain, e.g., an antigen binding domain described herein;

[0573] a transmembrane domain; and
[0574] an intracellular signaling domain, wherein the second CAR^{CD8+} comprises an intracellular signaling domain, e.g., a costimulatory signaling domain, not present on the CAR^{CD8+}, and, optionally, does not comprise an ICOS signaling domain.

[0575] Other assays, including those that are known in the art can also be used to evaluate the TOX^{hi} CAR molecules of the invention.

### Methods Using Biomarkers for Evaluating CAR-Effectiveness, Subject Suitability, or Sample Suitability

[0576] In some embodiments, the invention features a method of evaluating or monitoring the effectiveness of a CAR-expressing cell therapy in a subject (e.g., a subject having a cancer). The method includes acquiring a value of effectiveness to the TOX^{hi} CAR therapy, subject suitability, or sample suitability, wherein said value is indicative of the effectiveness or suitability of the CAR-expressing cell therapy.

[0577] In some embodiments of any of the methods disclosed herein, the subject is evaluated prior to receiving, during, or after receiving, the TOX^{hi} CAR-expressing cell therapy.

[0578] In some embodiments of any of the methods disclosed herein, a responder (e.g., a complete responder) has, or is identified as having, a greater level or activity of one, two, or more (all) of GZMK, PPF1BP2, or naïve T cells as compared to a non-responder.

[0579] In some embodiments of any of the methods disclosed herein, a non-responder has, or is identified as having, a greater level or activity of one, two, three, four, five, six, seven, or more (e.g., all) of IL22, IL-2RA, IL-21, IRF8, IL8, CCL17, CCL22, effector T cells, or regulatory T cells, as compared to a responder.

[0580] In some embodiments, a relapser is a patient having, or who is identified as having, an increased level of expression of one or more of (e.g., 2, 3, 4, or all of) the following genes, compared to non relapsers: MIR199A1, MIR1203, uc021ovp, ITM2C, and HLA-DQB1 and/or a decreased levels of expression of one or more of (e.g., 2, 3, 4, 5, 6, 7, 8, 9, 10, 11, or all of) the following genes, compared to non relapsers: PPIAL4D, TTTY10, TXLNG2P, MIR4650-1, KDM5D, USP9Y, PRKY, RPS4Y2, RPS4Y1, NCRNA00185, SULT1E1, and EIF1AY.

[0581] In some embodiments of any of the methods disclosed herein, a non-responder has, or is identified as having, a greater percentage of an immune cell exhaustion marker, e.g., one, two or more immune checkpoint inhibitors (e.g., PD-1, PD-L1, TIM-3 and/or LAG-3). In some embodiments, a non-responder has, or is identified as having, a greater percentage of PD-1, PD-L1, or LAG-3 expressing immune effector cells (e.g., CD4+ T cells and/or CD8+ T cells) (e.g., CAR-expressing CD4+ cells and/or CD8+ T cells) compared to the percentage of PD-1 or LAG-3 expressing immune effector cells from a responder.

[0582] In some embodiments, a non-responder has, or is identified as having, a greater percentage of immune cells having an exhausted phenotype, e.g., immune cells that co-express at least two exhaustion markers, e.g., co-expresses PD-1, PD-L1 and/or TIM-3. In other embodiments, a non-responder has, or is identified as having, a greater percentage of immune cells having an exhausted phenotype, e.g., immune cells that co-express at least two exhaustion markers, e.g., co-expresses PD-1 and LAG-3.

[0583] In some embodiments of any of the methods disclosed herein, a non-responder has, or is identified as having, a greater percentage of PD-1/PD-L1+/LAG-3+ cells in the TOX^{hi} CAR-expressing cell population compared to a responder (e.g., a complete responder) to the CAR-expressing cell therapy.

[0584] In some embodiments of any of the methods disclosed herein, a partial responder has, or is identified as having, a higher percentages of PD-1/PD-L1+/LAG-3+ cells, than a responder, in the TOX^{hi} CAR-expressing cell population.

[0585] In some embodiments of any of the methods disclosed herein, a non-responder has, or is identified as having, an exhausted phenotype of PD1/PD-L1+ CAR+ and co-expression of LAG3 in the TOX^{hi} CAR-expressing cell population.

[0586] In some embodiments of any of the methods disclosed herein, a non-responder has, or is identified as having, a greater percentage of PD-1/PD-L1+/TIM-3+ cells in the CAR-expressing cell population compared to the responder (e.g., a complete responder).

[0587] In some embodiments of any of the methods disclosed herein, a partial responders has, or is identified as having, a higher percentage of PD-1/PD-L1+/TIM-3+ cells, than responders, in the TOX^{hi} CAR-expressing cell population.

[0588] In some embodiments of any of the methods disclosed herein, the presence of CD8+ CD27+CD45RO− T cells in an apheresis sample is a positive predictor of the subject response to a TOX^{hi} CAR-expressing cell therapy.

[0589] In some embodiments of any of the methods disclosed herein, a high percentage of PD1+ CAR+ and LAG3+ or TIM3+ T cells in an apheresis sample is a poor prognostic predictor of the subject response to a TOX^{hi} CAR-expressing cell therapy.

[0590] In some embodiments of any of the methods disclosed herein, the responder (e.g., the complete or partial responder) has one, two, three or more (or all) of the following profile:

[0591] (i) has a greater number of CD27+ immune effector cells compared to a reference value, e.g., a non-responder number of CD27+ immune effector cells;

[0592] (ii) has a greater number of CD8+ T cells compared to a reference value, e.g., a non-responder number of CD8+ T cells;

[0593] (iii) has a lower number of immune cells expressing one or more checkpoint inhibitors, e.g., a checkpoint inhibitor chosen from PD-1, PD-L1, LAG-3, TIM-3, or KLRG-1, or a combination, compared to a reference value, e.g., a non-responder number of cells expressing one or more checkpoint inhibitors; or

[0594] (iv) has a greater number of one, two, three, four or more (all) of resting TEFF cells, resting T_{REG} cells, naïve CD4 cells, unstimulated memory cells or early memory T cells, or a combination thereof, compared to a reference value, e.g., a non-responder number of resting TEFF cells, resting T_{REG} cells, naïve CD4 cells, unstimulated memory cells or early memory T cells.

[0595] In some embodiments of any of the methods disclosed herein, the cytokine level or activity is chosen from one, two, three, four, five, six, seven, eight, or more (or all) of cytokine CCL20/M1P3a, IL17A, IL6, GM-CSF, IFN-γ, IL10, IL13, IL2, IL21, IL4, IL5, IL9 or TNFα, or a combination thereof. The cytokine can be chosen from one, two, three, four or more (all) of IL-17a, CCL20, IL2, IL6, or TNFa. In some embodiments, an increased level or activity of a cytokine is chosen from one or both of IL-17a and CCL20, is indicative of increased responsiveness or decreased relapse.

[0596] In embodiments, the responder, a non-responder, a relapser or a non-relapser identified by the methods herein can be further evaluated according to clinical criteria. For example, a complete responder has, or is identified as, a subject having a disease, e.g., a cancer, who exhibits a complete response, e.g., a complete remission, to a treatment. A complete response may be identified, e.g., using the NCCN Guidelines®, or Cheson et al, J Clin Oncol 17:1244 (1999) and Cheson et al., “Revised Response Criteria for Malignant Lymphoma”, J Clin Oncol 25:579-586 (2007) (both of which are incorporated by reference herein in their entireties), as described herein. A partial responder has, or is identified as, a subject having a disease, e.g., a cancer, who exhibits a partial response, e.g., a partial remission, to a treatment. A partial response may be identified, e.g., using the NCCN Guidelines®, or Cheson criteria as described herein. A non-responder has, or is identified as, a subject having a disease, e.g., a cancer, who does not exhibit a response to a treatment, e.g., the patient has stable disease or progressive disease. A non-responder may be identified, e.g., using the NCCN Guidelines®, or Cheson criteria as described herein.

[0597] Alternatively, or in combination with the methods disclosed herein, responsive to said value, performing one, two, three four or more of:

[0598] administering e.g., to a responder or a non-relapser, a TOX^{hi} CAR-expressing cell therapy;

[0599] administered an altered dosing of a TOX^{hi} CAR-expressing cell therapy;

[0600] altering the schedule or time course of a TOX^{hi} CAR-expressing cell therapy;

[0601] administering, e.g., to a non-responder or a partial responder, an additional agent in combination with a TOX^{hi} CAR-expressing cell therapy, e.g., a checkpoint inhibitor, e.g., a checkpoint inhibitor described herein;

[0602] administering to a non-responder or partial responder a therapy that increases the number of younger T cells in the subject prior to treatment with a TOX^{hi} CAR-expressing cell therapy;

[0603] modifying a manufacturing process of a TOX^{hi} CAR-expressing cell therapy, e.g., enriching for younger T cells prior to introducing a nucleic acid encoding a CAR, or increasing the transduction efficiency, e.g., for a subject identified as a non-responder or a partial responder;

[0604] administering an alternative therapy, e.g., for a non-responder or partial responder or relapser; or

[0605] if the subject is, or is identified as, a non-responder or a relapser, decreasing the T_{REG} cell population and/or T_{REG} gene signature, e.g., by one or more of CD25 depletion, administration of cyclophosphamide, anti-GITR antibody, or a combination thereof.

[0606] In some embodiments, the subject is pre-treated with an anti-GITR antibody. In some embodiments, the subject is treated with an anti-GITR antibody prior to infusion or re-infusion.

### Combination Therapies

[0607] A TOX^{hi} CAR-expressing cell described herein may be used in combination with other known agents and therapies. Administered “in combination”, as used herein, means that two (or more) different treatments are delivered to the subject during the course of the subject's affliction with the disorder, e.g., the two or more treatments are delivered after the subject has been diagnosed with the disorder and before the disorder has been cured or eliminated or treatment has ceased for other reasons. In some embodiments, the delivery of one treatment is still occurring when the delivery of the second begins, so that there is overlap in terms of administration. This is sometimes referred to herein as “simultaneous” or “concurrent delivery”. In other embodiments, the delivery of one treatment ends before the delivery of the other treatment begins. In some embodiments of either case, the treatment is more effective because of combined administration. For example, the second treatment is more effective, e.g., an equivalent effect is seen with less of the second treatment, or the second treatment reduces symptoms to a greater extent, than would be seen if the second treatment were administered in the absence of the first treatment, or the analogous situation is seen with the first treatment. In some embodiments, delivery is such that the reduction in a symptom, or other parameter related to the disorder is greater than what would be observed with one treatment delivered in the absence of the other. The effect of the two treatments can be partially additive, wholly additive, or greater than additive. The delivery can be such that an effect of the first treatment delivered is still detectable when the second is delivered.

[0608] A TOX^{hi} CAR-expressing cell described herein and the at least one additional therapeutic agent can be administered simultaneously, in the same or in separate compositions, or sequentially. For sequential administration, the CAR-expressing cell described herein can be administered first, and the additional agent can be administered second, or the order of administration can be reversed.

[0609] The TOX^{hi} CAR therapy and/or other therapeutic agents, procedures or modalities can be administered during periods of active disorder, or during a period of remission or less active disease. The CAR therapy can be administered before the other treatment, concurrently with the treatment, post-treatment, or during remission of the disorder.

[0610] When administered in combination, the TOX^{hi} CAR therapy and the additional agent (e.g., second or third agent), or all, can be administered in an amount or dose that is higher, lower or the same than the amount or dosage of each agent used individually, e.g., as a monotherapy. In some embodiments, the administered amount or dosage of the TOX^{hi} CAR therapy, the additional agent (e.g., second or third agent), or all, is lower (e.g., at least 20%, at least 30%, at least 40%, or at least 50%) than the amount or dosage of each agent used individually, e.g., as a monotherapy. In other embodiments, the amount or dosage of the TOX^{hi} CAR therapy, the additional agent (e.g., second or third agent), or all, that results in a desired effect (e.g., treatment of cancer) is lower (e.g., at least 20%, at least 30%, at least 40%, or at least 50% lower) than the amount or dosage of each agent used individually, e.g., as a monotherapy, required to achieve the same therapeutic effect.

[0611] In some embodiments, the invention discloses a combination therapy including a TOX^{hi} CAR-expressing cell therapy described herein, an RNA molecule described herein (or a nucleic acid molecule encoding the RNA molecule), and an additional therapeutic agent.

### PD-1 Inhibitor

[0612] In some embodiments, the additional therapeutic agent is a PD-1 inhibitor. In some embodiments, the PD-1 inhibitor is chosen from PDR001 (Novartis), Nivolumab (Bristol-Myers Squibb), Pembrolizumab (Merck & Co), Pidilizumab (CureTech), MEDI0680 (Medimmune), REGN2810 (Regeneron), TSR-042 (Tesaro), PF-06801591 (Pfizer), BGB-A317 (Beigene), BGB-108 (Beigene), INCSHR1210 (Incyte), or AMP-224 (Amplimmune).

[0613] In some embodiments, the PD-1 inhibitor is an anti-PD-1 antibody molecule. In some embodiments, the PD-1 inhibitor is an anti-PD-1 antibody molecule as described in US 2015/0210769, published on Jul. 30, 2015, entitled “Antibody Molecules to PD-1 and Uses Thereof,” incorporated by reference in its entirety. In some embodiments, the anti-PD-1 antibody molecule comprises the CDRs, variable regions, heavy chains and/or light chains of BAP049-Clone-E or BAP049-Clone-B disclosed in US 2015/0210769. The antibody molecules described herein can be made by vectors, host cells, and methods described in US 2015/0210769, incorporated by reference in its entirety.

[0614] In some embodiments, the anti-PD-1 antibody molecule is Nivolumab (Bristol-Myers Squibb), also known as MDX-1106, MDX-1106-04, ONO-4538, BMS-936558, or OPDIVO®. Nivolumab (clone 5C4) and other anti-PD-1 antibodies are disclosed in U.S. Pat. No. 8,008,449 and WO 2006/121168, incorporated by reference in their entirety. In some embodiments, the anti-PD-1 antibody molecule is Pembrolizumab (Merck & Co), also known as Lambrolizumab, MK-3475, MK03475, SCH-900475, or KEYTRUDA®. Pembrolizumab and other anti-PD-1 antibodies are disclosed in Hamid, O. et al. (2013) New England Journal of Medicine 369 (2): 134-44, U.S. Pat. No. 8,354,509, and WO 2009/114335, incorporated by reference in their entirety. In some embodiments, the anti-PD-1 antibody molecule is Pidilizumab (CureTech), also known as CT-011. Pidilizumab and other anti-PD-1 antibodies are disclosed in Rosenblatt, J. et al. (2011) J Immunotherapy 34(5): 409-18, U.S. Pat. Nos. 7,695,715, 7,332,582, and 8,686,119, incorporated by reference in their entirety. In some embodiments, the anti-PD-1 antibody molecule is MEDI0680 (Medimmune), also known as AMP-514. MEDI0680 and other anti-PD-1 antibodies are disclosed in U.S. Pat. No. 9,205,148 and WO 2012/145493, incorporated by reference in their entirety. In some embodiments, the anti-PD-1 antibody molecule is REGN2810 (Regeneron). In some embodiments, the anti-PD-1 antibody molecule is PF-06801591 (Pfizer). In some embodiments, the anti-PD-1 antibody molecule is BGB-A317 or BGB-108 (Beigene). In some embodiments, the anti-PD-1 antibody molecule is INCSHR1210 (Incyte), also known as INCSHR01210 or SHR-1210. In some embodiments, the anti-PD-1 antibody molecule is TSR-042 (Tesaro), also known as ANB011.

[0615] Further known anti-PD-1 antibody molecules include those described, e.g., in WO 2015/112800, WO 2016/092419, WO 2015/085847, WO 2014/179664, WO 2014/194302, WO 2014/209804, WO 2015/200119, U.S. Pat. Nos. 8,735,553, 7,488,802, 8,927,697, 8,993,731, and 9,102,727, incorporated by reference in their entirety.

[0616] In some embodiments, the PD-1 inhibitor is a peptide that inhibits the PD-1 signaling pathway, e.g., as described in U.S. Pat. No. 8,907,053, incorporated by reference in its entirety. In some embodiments, the PD-1 inhibitor is an immunoadhesin (e.g., an immunoadhesin comprising an extracellular or PD-1 binding portion of PD-L1 or PD-L2 fused to a constant region (e.g., an Fc region of an immunoglobulin sequence). In some embodiments, the PD-1 inhibitor is AMP-224 (B7-DCIg (Amplimmune), e.g., disclosed in WO 2010/027827 and WO 2011/066342, incorporated by reference in their entirety).

### PD-L1 Inhibitors

[0617] In some embodiments, the additional therapeutic agent is a PD-L1 inhibitor. In some embodiments, the PD-L1 inhibitor is chosen from FAZ053 (Novartis), Atezolizumab (Genentech/Roche), Avelumab (Merck Serono and Pfizer), Durvalumab (MedImmune/AstraZeneca), or BMS-936559 (Bristol-Myers Squibb).

[0618] In some embodiments, the PD-L1 inhibitor is an anti-PD-L1 antibody molecule. In some embodiments, the PD-L1 inhibitor is an anti-PD-L1 antibody molecule as disclosed in US 2016/0108123, published on Apr. 21, 2016, entitled “Antibody Molecules to PD-L1 and Uses Thereof,” incorporated by reference in its entirety. In some embodiments, the anti-PD-L1 antibody molecule comprises the CDRs, variable regions, heavy chains and/or light chains of BAP058-Clone O or BAP058-Clone N disclosed in US 2016/0108123.

[0619] In some embodiments, the anti-PD-L1 antibody molecule is Atezolizumab (Genentech/Roche), also known as MPDL3280A, RG7446, R05541267, YW243.55.570, or TECENTRIQ™. Atezolizumab and other anti-PD-L1 antibodies are disclosed in U.S. Pat. No. 8,217,149, incorporated by reference in its entirety. In some embodiments, the anti-PD-L1 antibody molecule is Avelumab (Merck Serono and Pfizer), also known as MSB0010718C. Avelumab and other anti-PD-L1 antibodies are disclosed in WO 2013/079174, incorporated by reference in its entirety. In some embodiments, the anti-PD-L1 antibody molecule is Durvalumab (MedImmune/AstraZeneca), also known as MEDI4736. Durvalumab and other anti-PD-L1 antibodies are disclosed in U.S. Pat. No. 8,779,108, incorporated by reference in its entirety. In some embodiments, the anti-PD-L1 antibody molecule is BMS-936559 (Bristol-Myers Squibb), also known as MDX-1105 or 12A4. BMS-936559 and other anti-PD-L1 antibodies are disclosed in U.S. Pat. No. 7,943,743 and WO 2015/081158, incorporated by reference in their entirety.

[0620] Further known anti-PD-L1 antibodies include those described, e.g., in WO 2015/181342, WO 2014/100079, WO 2016/000619, WO 2014/022758, WO 2014/055897, WO 2015/061668, WO 2013/079174, WO 2012/145493, WO 2015/112805, WO 2015/109124, WO 2015/195163, U.S. Pat. Nos. 8,168,179, 8,552,154, 8,460,927, and 9,175,082, incorporated by reference in their entirety.

### LAG-3 Inhibitors

[0621] In some embodiments, the additional therapeutic agent is a LAG-3 inhibitor. In some embodiments, the LAG-3 inhibitor is chosen from LAG525 (Novartis), BMS-986016 (Bristol-Myers Squibb), or TSR-033 (Tesaro).

[0622] In some embodiments, the LAG-3 inhibitor is an anti-LAG-3 antibody molecule. In some embodiments, the LAG-3 inhibitor is an anti-LAG-3 antibody molecule as disclosed in US 2015/0259420, published on Sep. 17, 2015, entitled “Antibody Molecules to LAG-3 and Uses Thereof,” incorporated by reference in its entirety. In some embodiments, the anti-LAG-3 antibody molecule comprises the CDRs, variable regions, heavy chains and/or light chains of BAP050-Clone I or BAP050-Clone J disclosed in US 2015/0259420.

[0623] In some embodiments, the anti-LAG-3 antibody molecule is BMS-986016 (Bristol-Myers Squibb), also known as BMS986016. BMS-986016 and other anti-LAG-3 antibodies are disclosed in WO 2015/116539 and U.S. Pat. No. 9,505,839, incorporated by reference in their entirety. In some embodiments, the anti-LAG-3 antibody molecule is TSR-033 (Tesaro). In some embodiments, the anti-LAG-3 antibody molecule is IMP731 or GSK2831781 (GSK and Prima BioMed). IMP731 and other anti-LAG-3 antibodies are disclosed in WO 2008/132601 and U.S. Pat. No. 9,244,059, incorporated by reference in their entirety. In some embodiments, the anti-LAG-3 antibody molecule is IMP761 (Prima BioMed).

[0624] Further known anti-LAG-3 antibodies include those described, e.g., in WO 2008/132601, WO 2010/019570, WO 2014/140180, WO 2015/116539, WO 2015/200119, WO 2016/028672, U.S. Pat. Nos. 9,244,059, 9,505,839, incorporated by reference in their entirety.

[0625] In some embodiments, the anti-LAG-3 inhibitor is a soluble LAG-3 protein, e.g., IMP321 (Prima BioMed), e.g., as disclosed in WO 2009/044273, incorporated by reference in its entirety.

### TIM-3 Inhibitors

[0626] In some embodiments, the additional therapeutic agent is a TIM-3 inhibitor. In some embodiments, the TIM-3 inhibitor is MGB453 (Novartis) or TSR-022 (Tesaro).

[0627] In some embodiments, the TIM-3 inhibitor is an anti-TIM-3 antibody molecule. In some embodiments, the TIM-3 inhibitor is an anti-TIM-3 antibody molecule as disclosed in US 2015/0218274, published on Aug. 6, 2015, entitled “Antibody Molecules to TIM-3 and Uses Thereof,” incorporated by reference in its entirety. In some embodiments, the anti-TIM-3 antibody molecule comprises the CDRs, variable regions, heavy chains and/or light chains of ABTIM3-hum11 or ABTIM3-hum03 disclosed in US 2015/0218274.

[0628] In some embodiments, the anti-TIM-3 antibody molecule is TSR-022 (AnaptysBio/Tesaro). In some embodiments, the anti-TIM-3 antibody molecule comprises one or more of the CDR sequences (or collectively all of the CDR sequences), the heavy chain or light chain variable region sequence, or the heavy chain or light chain sequence of APE5137 or APE5121. APE5137, APE5121, and other anti-TIM-3 antibodies are disclosed in WO 2016/161270, incorporated by reference in its entirety. In some embodiments, the anti-TIM-3 antibody molecule is the antibody clone F38-2E2.

[0629] Further known anti-TIM-3 antibodies include those described, e.g., in WO 2016/111947, WO 2016/071448, WO 2016/144803, U.S. Pat. Nos. 8,552,156, 8,841,418, and 9,163,087, incorporated by reference in their entirety.

### Chemotherapeutic Agents

[0630] In some embodiments, the additional therapeutic agent is a chemotherapeutic agent. Exemplary chemotherapeutic agents include an anthracycline (e.g., doxorubicin (e.g., liposomal doxorubicin)), a vinca alkaloid (e.g., vinblastine, vincristine, vindesine, vinorelbine), an alkylating agent (e.g., cyclophosphamide, decarbazine, melphalan, ifosfamide, temozolomide), an immune cell antibody (e.g., alemtuzamab, gemtuzumab, rituximab, tositumomab), an antimetabolite (including, e.g., folic acid antagonists, pyrimidine analogs, purine analogs and adenosine deaminase inhibitors (e.g., fludarabine)), an mTOR inhibitor, a TNFR glucocorticoid induced TNFR related protein (GITR) agonist, a proteasome inhibitor (e.g., aclacinomycin A, gliotoxin or bortezomib), an immunomodulator such as thalidomide or a thalidomide derivative (e.g., lenalidomide).

[0631] General Chemotherapeutic agents considered for use in combination therapies include anastrozole (Arimidex®), bicalutamide (Casodex®), bleomycin sulfate (Blenoxane®), busulfan (Myleran®), busulfan injection (Busulfex®), capecitabine (Xeloda®), N4-pentoxycarbonyl-5-deoxy-5-fluorocytidine, carboplatin (Paraplatin®), carmustine (BiCNU®), chlorambucil (Leukeran®), cisplatin (Platinol®), cladribine (Leustatin®), cyclophosphamide (Cytoxan® or Neosar®), cytarabine, cytosine arabinoside (Cytosar-U®), cytarabine liposome injection (DepoCyt®), dacarbazine (DTIC-Dome®), dactinomycin (Actinomycin D, Cosmegan), daunorubicin hydrochloride (Cerubidine®), daunorubicin citrate liposome injection (DaunoXome®), dexamethasone, docetaxel (Taxotere®), doxorubicin hydrochloride (Adriamycin®, Rubex®), etoposide (Vepesid®), fludarabine phosphate (Fludara®), 5-fluorouracil (Adrucil®, Efudex®), flutamide (Eulexin®), tezacitibine, Gemcitabine (difluorodeoxycitidine), hydroxyurea (Hydrea®), Idarubicin (Idamycin®), ifosfamide (IFEX®), irinotecan (Camptosar®), L-asparaginase (ELSPAR®), leucovorin calcium, melphalan (Alkeran®), 6-mercaptopurine (Purinethol®), methotrexate (Folex®), mitoxantrone (Novantrone®), mylotarg, paclitaxel (Taxol®), phoenix (Yttrium90/MX-DTPA), pentostatin, polifeprosan 20 with carmustine implant (Gliadel®), tamoxifen citrate (Nolvadex®), teniposide (Vumon®), 6-thioguanine, thiotepa, tirapazamine (Tirazone®), topotecan hydrochloride for injection (Hycamptin®), vinblastine (Velban®), vincristine (Oncovin®), and vinorelbine (Navelbine®).

[0632] Exemplary alkylating agents include, without limitation, nitrogen mustards, ethylenimine derivatives, alkyl sulfonates, nitrosoureas and triazenes): uracil mustard (Aminouracil Mustard®, Chlorethaminacil®, Demethyldopan®, Desmethyldopan®, Haemanthamine®, Nordopan®, Uracil nitrogen Mustard®, Uracillost®, Uracilmostaza®, Uramustin®, Uramustine®), chlormethine (Mustargen®), cyclophosphamide (Cytoxan®, Neosar®, Clafen®, Endoxan®, Procytox®, Revimmune™), ifosfamide (Mitoxana®), melphalan (Alkeran®), Chlorambucil (Leukeran®), pipobroman (Amedel®, Vercyte®), triethylenemelamine (Hemel®, Hexalen®, Hexastat®), triethylenethiophosphoramine, Temozolomide (Temodar®), thiotepa (Thioplex®), busulfan (Busilvex®, Myleran®), carmustine (BiCNU®), lomustine (CeeNU®), streptozocin (Zanosar®), and Dacarbazine (DTIC-Dome®). Additional exemplary alkylating agents include, without limitation, Oxaliplatin (Eloxatin®); Temozolomide (Temodar® and Temodal®); Dactinomycin (also known as actinomycin-D, Cosmegen®); Melphalan (also known as L-PAM, L-sarcolysin, and phenylalanine mustard, Alkeran®); Altretamine (also known as hexamethylmelamine (HMM), Hexalen®); Carmustine (BiCNU®); Bendamustine (Treanda®); Busulfan (Busulfex® and Myleran®); Carboplatin (Paraplatin®); Lomustine (also known as CCNU, CeeNU®); Cisplatin (also known as CDDP, Platinol® and Platinol®-AQ); Chlorambucil (Leukeran®); Cyclophosphamide (Cytoxan® and Neosar®); Dacarbazine (also known as DTIC, DIC and imidazole carboxamide, DTIC-Dome®); Altretamine (also known as hexamethylmelamine (HMM), Hexalen®); Ifosfamide (Ifex®); Prednumustine; Procarbazine (Matulane®); Mechlorethamine (also known as nitrogen mustard, mustine and mechloroethamine hydrochloride, Mustargen®); Streptozocin (Zanosar®); Thiotepa (also known as thiophosphoamide, TESPA and TSPA, Thioplex®); Cyclophosphamide (Endoxan®, Cytoxan®, Neosar®, Procytox®, Revimmune®); and Bendamustine HCl (Treanda®).

[0633] Exemplary mTOR inhibitors include, e.g., temsirolimus; ridaforolimus (formally known as deferolimus, (1R,2R,4S)-4-[(2R)-2 [(1R,9S,12S,15R,16E,18R,19R,21R,23S,24E,26E,28Z,30S,32S,35R)-1,18-dihydroxy-19,30-dimethoxy-15,17,21,23,29,35-hexamethyl-2,3,10,14,20-pentaoxo-11,36-dioxa-4-azatricyclo[30.3.1.0^{4,9}]hexatriaconta-16,24,26,28-tetraen-12-yl]propyl]-2-methoxycyclohexyl dimethylphosphinate, also known as AP23573 and MK8669, and described in PCT Publication No. WO 03/064383); everolimus (Afinitor® or RAD001); rapamycin (AY22989, Sirolimus®); simapimod (CAS 164301-51-3); emsirolimus, (5-{2,4-Bis[(3S)-3-methylmorpholin-4-yl]pyrido[2,3-d]pyrimidin-7-yl}-2-methoxyphenyl)methanol (AZD8055); 2-Amino-8-[trans-4-(2-hydroxyethoxy)cyclohexyl]-6-(6-methoxy-3-pyridinyl)-4-methyl-pyrido[2,3-d]pyrimidin-7(8H)-one (PF04691502, CAS 1013101-36-4); and N²-[1,4-dioxo-4-[[4-(4-oxo-8-phenyl-4H-1-benzopyran-2-yl)morpholinium-4-yl]methoxy]butyl]-L-arginylglycyl-L-α-aspartylL-serine-inner salt (SEQ ID NO: 1482) (SF1126, CAS 936487-67-1), and XL765.

[0634] Exemplary immunomodulators include, e.g., afutuzumab (available from Roche®); pegfilgrastim (Neulasta®); lenalidomide (CC-5013, Revlimid®); thalidomide (Thalomid®), actimid (CC4047); and IRX-2 (mixture of human cytokines including interleukin 1, interleukin 2, and interferon γ, CAS 951209-71-5, available from IRX Therapeutics).

[0635] Exemplary anthracyclines include, e.g., doxorubicin (Adriamycin® and Rubex®); bleomycin (Lenoxane®); daunorubicin (dauorubicin hydrochloride, daunomycin, and rubidomycin hydrochloride, Cerubidine®); daunorubicin liposomal (daunorubicin citrate liposome, DaunoXome®); mitoxantrone (DHAD, Novantrone®); epirubicin (Ellence™); idarubicin (Idamycin®, Idamycin PFS®); mitomycin C (Mutamycin®); geldanamycin; herbimycin; ravidomycin; and desacetylravidomycin.

[0636] Exemplary vinca alkaloids include, e.g., vinorelbine tartrate (Navelbine®), Vincristine (Oncovin®), and Vindesine (Eldisine®)); vinblastine (also known as vinblastine sulfate, vincaleukoblastine and VLB, Alkaban-AQ® and Velban®); and vinorelbine (Navelbine®).

[0637] Exemplary proteosome inhibitors include bortezomib (Velcade®); carfilzomib (PX-171-007, (S)-4-Methyl-N—((S)-1-(((S)-4-methyl-1-((R)-2-methyloxiran-2-yl)-1-oxopentan-2-yl)amino)-1-oxo-3-phenylpropan-2-yl)-2-((S)-2-(2-morpholinoacetamido)-4-phenylbutanamido)-pentanamide); marizomib (NPI-0052); ixazomib citrate (MLN-9708); delanzomib (CEP-18770); and O-Methyl-N-[(2-methyl-5-thiazolyl)carbonyl]-L-seryl-O-methyl-N-[(1S)-2-[(2R)-2-methyl-2-oxiranyl]-2-oxo-1-(phenylmethyl)ethyl]-L-serinamide (ONX-0912).

### Biopolymer Delivery Methods

[0638] In some embodiments, one or more CAR-expressing cells as disclosed herein can be administered or delivered to the subject via a biopolymer scaffold, e.g., a biopolymer implant. Biopolymer scaffolds can support or enhance the delivery, expansion, and/or dispersion of the CAR-expressing cells described herein. A biopolymer scaffold comprises a biocompatible (e.g., does not substantially induce an inflammatory or immune response) and/or a biodegradable polymer that can be naturally occurring or synthetic.

[0639] Examples of suitable biopolymers include, but are not limited to, agar, agarose, alginate, alginate/calcium phosphate cement (CPC), beta-galactosidase (β-GAL), (1,2,3,4,6-pentaacetyl a-D-galactose), cellulose, chitin, chitosan, collagen, elastin, gelatin, hyaluronic acid collagen, hydroxyapatite, poly(3-hydroxybutyrate-co-3-hydroxy-hexanoate) (PHBHHx), poly(lactide), poly(caprolactone) (PCL), poly(lactide-co-glycolide) (PLG), polyethylene oxide (PEO), poly(lactic-co-glycolic acid) (PLGA), polypropylene oxide (PPO), polyvinyl alcohol) (PVA), silk, soy protein, and soy protein isolate, alone or in combination with any other polymer composition, in any concentration and in any ratio. The biopolymer can be augmented or modified with adhesion- or migration-promoting molecules, e.g., collagen-mimetic peptides that bind to the collagen receptor of lymphocytes, and/or stimulatory molecules to enhance the delivery, expansion, or function, e.g., anti-cancer activity, of the cells to be delivered. The biopolymer scaffold can be an injectable, e.g., a gel or a semi-solid, or a solid composition.

[0640] In some embodiments, CAR-expressing cells described herein are seeded onto the biopolymer scaffold prior to delivery to the subject. In embodiments, the biopolymer scaffold further comprises one or more additional therapeutic agents described herein (e.g., another CAR-expressing cell, an antibody, or a small molecule) or agents that enhance the activity of a CAR-expressing cell, e.g., incorporated or conjugated to the biopolymers of the scaffold. In embodiments, the biopolymer scaffold is injected, e.g., intratumorally, or surgically implanted at the tumor or within a proximity of the tumor sufficient to mediate an anti-tumor effect. Additional examples of biopolymer compositions and methods for their delivery are described in Stephan et al., Nature Biotechnology, 2015, 33:97-101; and WO2014/110591.

### Pharmaceutical Compositions and Treatments

[0641] Pharmaceutical compositions of the present invention may comprise a CAR-expressing cell, e.g., a plurality of CAR-expressing cells, as described herein, in combination with one or more pharmaceutically or physiologically acceptable carriers, diluents or excipients. Such compositions may comprise buffers such as neutral buffered saline, phosphate buffered saline and the like; carbohydrates such as glucose, mannose, sucrose or dextrans, mannitol; proteins; polypeptides or amino acids such as glycine; antioxidants; chelating agents such as EDTA or glutathione; adjuvants (e.g., aluminum hydroxide); and preservatives. Compositions of the present invention are in some embodiments formulated for intravenous administration.

[0642] Pharmaceutical compositions of the present invention may be administered in a manner appropriate to the disease to be treated (or prevented). The quantity and frequency of administration will be determined by such factors as the condition of the patient, and the type and severity of the patient's disease, although appropriate dosages may be determined by clinical trials.

[0643] In some embodiments, the pharmaceutical composition is substantially free of, e.g., there are no detectable levels of a contaminant, e.g., selected from the group consisting of endotoxin, mycoplasma, replication competent lentivirus (RCL), p24, VSV-G nucleic acid, HIV gag, residual anti-CD3/anti-CD28 coated beads, mouse antibodies, pooled human serum, bovine serum albumin, bovine serum, culture media components, vector packaging cell or plasmid components, a bacterium and a fungus. In some embodiments, the bacterium is at least one selected from the group consisting of Alcaligenes faecalis, Candida albicans, Escherichia coli, Haemophilus influenza, Neisseria meningitides, Pseudomonas aeruginosa, Staphylococcus aureus, Streptococcus pneumonia, and Streptococcus pyogenes group A.

[0644] When “an immunologically effective amount,” “an anti-tumor effective amount,” “a tumor-inhibiting effective amount,” or “therapeutic amount” is indicated, the precise amount of the compositions of the present invention to be administered can be determined by a physician with consideration of individual differences in age, weight, tumor size, extent of infection or metastasis, and condition of the patient (subject). It can generally be stated that a pharmaceutical composition comprising the T cells described herein may be administered at a dosage of 10⁴ to 10⁹ cells/kg body weight, in some instances 10⁵ to 10⁶ cells/kg body weight, including all integer values within those ranges. T cell compositions may also be administered multiple times at these dosages. The cells can be administered by using infusion techniques that are commonly known in immunotherapy (see, e.g., Rosenberg et al., New Eng. J. of Med. 319:1676, 1988).

[0645] In certain embodiments, it may be desired to administer activated T cells to a subject and then subsequently redraw blood (or have an apheresis performed), activate T cells therefrom according to the present invention, and reinfuse the patient with these activated and expanded T cells. This process can be carried out multiple times every few weeks. In certain embodiments, T cells can be activated from blood draws of from 10 cc to 400 cc. In certain embodiments, T cells are activated from blood draws of 20 cc, 30 cc, 40 cc, 50 cc, 60 cc, 70 cc, 80 cc, 90 cc, or 100 cc.

[0646] The administration of the subject compositions may be carried out in any convenient manner, including by aerosol inhalation, injection, ingestion, transfusion, implantation or transplantation. The compositions described herein may be administered to a patient trans arterially, subcutaneously, intradermally, intratumorally, intranodally, intramedullary, intramuscularly, by intravenous (i.v.) injection, or intraperitoneally. In some embodiments, the T cell compositions of the present invention are administered to a patient by intradermal or subcutaneous injection. In some embodiments, the CAR-expressing cell (e.g., T cell or NK cell) compositions of the present invention are administered by i.v. injection. The compositions of CAR-expressing cells (e.g., T cells or NK cells) may be injected directly into a tumor, lymph node, or site of infection.

[0647] In some embodiments, subjects may undergo leukapheresis, wherein leukocytes are collected, enriched, or depleted ex vivo to select and/or isolate the cells of interest, e.g., immune effector cells (e.g., T cells or NK cells). These immune effector cell (e.g., T cell or NK cell) isolates may be expanded by methods known in the art and treated such that one or more CAR constructs of the invention may be introduced, thereby creating a CAR-expressing cell (e.g., CAR T cell or CAR-expressing NK cell) of the invention. Subjects in need thereof may subsequently undergo standard treatment with high dose chemotherapy followed by peripheral blood stem cell transplantation. In certain embodiments, following or concurrent with the transplant, subjects receive an infusion of the expanded CAR-expressing cells (e.g., CAR T cells or NK cells) of the present invention. In some embodiments, expanded cells are administered before or following surgery.

[0648] In embodiments, lymphodepletion is performed on a subject, e.g., prior to administering one or more cells that express a CAR described herein. In embodiments, the lymphodepletion comprises administering one or more of melphalan, cytoxan, cyclophosphamide, and fludarabine.

[0649] The dosage of the above treatments to be administered to a patient will vary with the precise nature of the condition being treated and the recipient of the treatment. The scaling of dosages for human administration can be performed according to art-accepted practices. The dose for CAMPATH, for example, will generally be in the range 1 to about 100 mg for an adult patient, usually administered daily for a period between 1 and 30 days. The preferred daily dose is 1 to 10 mg per day although in some instances larger doses of up to 40 mg per day may be used (described in U.S. Pat. No. 6,120,766).

[0650] In some embodiments, the CAR is introduced into immune effector cells (e.g., T cells or NK cells), e.g., using in vitro transcription, and the subject (e.g., human) receives an initial administration of CAR immune effector cells (e.g., T cells or NK cells) of the invention, and one or more subsequent administrations of the CAR immune effector cells (e.g., T cells or NK cells) of the invention, wherein the one or more subsequent administrations are administered less than 15 days, e.g., 14, 13, 12, 11, 10, 9, 8, 7, 6, 5, 4, 3, or 2 days after the previous administration. In some embodiments, more than one administration of the CAR immune effector cells (e.g., T cells or NK cells) of the invention are administered to the subject (e.g., human) per week, e.g., 2, 3, or 4 administrations of the CAR immune effector cells (e.g., T cells or NK cells) of the invention are administered per week. In some embodiments, the subject (e.g., human subject) receives more than one administration of the CAR immune effector cells (e.g., T cells or NK cells) per week (e.g., 2, 3 or 4 administrations per week) (also referred to herein as a cycle), followed by a week of no CAR immune effector cells (e.g., T cells or NK cells) administrations, and then one or more additional administration of the CAR immune effector cells (e.g., T cells or NK cells) (e.g., more than one administration of the CAR immune effector cells (e.g., T cells or NK cells) per week) is administered to the subject. In some embodiments, the subject (e.g., human subject) receives more than one cycle of CAR immune effector cells (e.g., T cells or NK cells), and the time between each cycle is less than 10, 9, 8, 7, 6, 5, 4, or 3 days. In some embodiments, the CAR immune effector cells (e.g., T cells or NK cells) are administered every other day for 3 administrations per week. In some embodiments, the CAR immune effector cells (e.g., T cells or NK cells) of the invention are administered for at least two, three, four, five, six, seven, eight or more weeks.

[0651] In some embodiments, CAR-expressing cells (e.g., CARTs or CAR-expressing NK cells) are generated using lentiviral viral vectors, such as lentivirus. CAR-expressing cells (e.g., CARTs or CAR-expressing NK cells) generated that way will have stable CAR expression.

[0652] In some embodiments, CAR-expressing cells, e.g., CARTs, are generated using a viral vector such as a gammaretroviral vector, e.g., a gammaretroviral vector described herein. CARTs generated using these vectors can have stable CAR expression.

[0653] In some embodiments, CAR-expressing cells (e.g., CARTs or CAR-expressing NK cells) transiently express CAR vectors for 4, 5, 6, 7, 8, 9, 10, 11, 12, 13, 14, 15 days after transduction. Transient expression of CARs can be effected by RNA CAR vector delivery. In some embodiments, the CAR RNA is transduced into the cell, e.g., T cell or NK cell, by electroporation.

[0654] A potential issue that can arise in patients being treated using transiently expressing CAR-expressing cells (e.g., CARTs or CAR-expressing NK cells) (particularly with murine scFv bearing CAR-expressing cells (e.g., CARTs or CAR-expressing NK cells)) is anaphylaxis after multiple treatments.

[0655] Without being bound by this theory, it is believed that such an anaphylactic response might be caused by a patient developing humoral anti-CAR response, i.e., anti-CAR antibodies having an anti-IgE isotype. It is thought that a patient's antibody producing cells undergo a class switch from IgG isotype (that does not cause anaphylaxis) to IgE isotype when there is a ten to fourteen day break in exposure to antigen.

[0656] If a patient is at high risk of generating an anti-CAR antibody response during the course of transient CAR therapy (such as those generated by RNA transductions), CAR-expressing cell (e.g., CART or CAR-expressing NK cell) infusion breaks should not last more than ten to fourteen days.

### EXAMPLES

[0657] The invention is further described in detail by reference to the following experimental examples. These examples are provided for purposes of illustration only, and are not intended to be limiting unless otherwise specified. Thus, the invention should in no way be construed as being limited to the following examples, but rather, should be construed to encompass any and all variations which become evident as a result of the teaching provided herein.

[0658] Without further description, it is believed that one of ordinary skill in the art can, using the preceding description and the following illustrative examples, make and utilize the compositions of the present invention and practice the claimed methods. The following working examples specifically point out various embodiments of the present invention, and are not to be construed as limiting in any way the remainder of the disclosure.

### Example 1: TOX2 Promotes T Cell Proliferation

[0659] This Example demonstrates the effect of Tet2 disruption on TOX2, and the role of TOX2 in T cells.

[0660] It has been previously shown that post-infusion CAR T cells from a CLL patient who went into complete remission following CAR T therapy, had a biallelic disruption in the gene for TET2, an enzyme that converts DNA 5-methycytosine (5mc) to 5-hydroxymethylcytosine (5hmc) (Fraietta J A et al., (2018) “Disruption of TET2 promotes the therapeutic efficacy of CD19-targeted T cells” Nature 558, 307-312). This loss of TET2 activity led to an increased expansion of the population of central memory T cells in the patient. In vitro knockdown of TET2 in CAR T cells from healthy human donors recapitulated this phenotype, showing an increase in CCR7+ central memory-like cells, an enhanced ability to kill target cancer cells, and increased proliferation in response to antigen.

[0661] This Example shows that knockdown of TET2 in healthy donor CART cells results in an increase in the level of TOX2 compared to control cells in which Tet2 was not knocked down (FIG. 1). In addition to increased expression levels of TOX2 protein in the TET2 knockdown, ATACseq performed on in vitro TET2 knockdown cells showed an increase in chromatin accessibility along the TOX2 locus, suggesting an opening of the chromatin upon disruption of TET2 (FIG. 1).

[0662] Next, the role of TOX2 in T cell function was investigated. To examine the effect of loss of TOX2, four shRNAs against TOX2 were designed and delivered via lentivirus into T cells from healthy human donors, along with the virus encoding CAR-19. Quantitative RT-PCR showed a range of knockdown efficiencies, from 80 percent down to about 40 percent residual expression. After a 14-day expansion in culture, a flow cytometry panel based on T cell differentiation was performed on these cells. As shown in FIG. 2A, a decrease in CD45RO+CCR7+ central memory-like cells was observed upon loss of TOX2. Stimulation of the cells with CD19 antigen presenting cells resulted in a decrease in T cell proliferation in cells with a knockdown of TOX2 (FIG. 2B). The proliferation defect was particularly observed at Day 22. The effect of TOX2 overexpression was also assessed. As shown in FIG. 2C overexpression of TOX2 with a lentivirus encoding TOX2 resulted in an increase in the proportion of CD45RO+CCR7+ central memory-like cells.

[0663] Taken together, the experiments and data disclosed herein suggest that elevated TOX2 mRNA levels in TET2 knockdown cells are important, e.g., for the functional advantages observed in said cells.

### Example 2: Effect of TOX2 on T Cell Differentiation and Function

[0664] This Example describes the effect of TOX2 on T cell differentiation and function. Based on the results described in Example 1, it was hypothesized that TOX2, which is expressed, e.g., almost exclusively in lymphocytes, could contribute to improvement in T cell function and/or changes in memory cell differentiation observed in the patient with biallelic TET2 disruption disclosed in Fraietta, et al. (2018).

### Rationale

[0665] As described in Example 1 and disclosed in Fraietta et al. (2018), disruption of the TET2 gene can lead to a response to CAR T therapy. Upon examination of RNA-seq data from this study, it was observed that levels of TOX2 mRNA are increased upon TET2 knockdown. Additionally, ATAC-seq data showed opening of chromatin at multiple sites throughout the TOX2 locus, both in vivo and in vitro. Initial data suggests that a knockdown of TOX2 in the same system shows a decrease in central memory-like cells, supporting the hypothesis that TOX2 is involved in the improvement observed in the TET2 knockdown (see Example 1 and FIG. 2A). Upon TET2 knockdown, there was a statistically significant increase in the ability of CAR T cells to lyse cancer cells that displayed the CD19 antigen. Additionally, when repeatedly re-stimulated with antigen-presenting cells, the TET2 knockdown T cells displayed a significant proliferation advantage, with the largest difference observed after 17 days. Example 1 showed that knocking down TOX2 had the opposite effect, showing a proliferation defect most pronounced at 22 days (see Example 1 and FIG. 2B). By overexpressing TOX2 as well as knocking it down simultaneously with TET2, the experiments described herein are expected to demonstrate a role for TOX2 as a promoter of T cell proliferation in response to antigen.

### Experiments

### Examine the Effect of Manipulating TOX2 Levels on T Cell Differentiation

[0666] Frozen peripheral blood mononuclear cells (PBMCs) will be obtained from the University of Pennsylvania's Human Immunology Core. Following established protocols, T cells will be isolated, and infected with lentivirus expressing CAR-19, as well as lentivirus expressing either the TOX2 shRNA, the TOX2 overexpression construct, and/or the combination of TOX2 and TET2 shRNAs. The cells will then be activated with Dynabeads Human T-Activator CD3/CD28 beads and expanded over 14 days in vitro. The resulting cells will be stained for flow cytometry with antibodies against CCR7, CD45RO, and CD27, to assess the memory subtypes that are present. In particular, these antibodies will allow distinguishing of central memory-like from effector-memory like T cells, a distinction with biological relevance in cancer immunotherapy.

### Examine the Effect of TOX2 Levels on In Vitro Killing of Target Cells

[0667] After the initial 14-day expansion, the CAR T cells will be thawed, and a co-culture with Nalm6 leukemia cells will be setup, using a range of effector (T cells) to target (Nalm6) ratios. These leukemia cells are specially designed to express CD19 as well as luciferase, such that whenever they are lysed by a T cell, the luciferase is released into the cytoplasm. After 18 hours of co-culture, the media will be washed away and the remaining target cells will be lysed with detergent. The remaining luciferase signal will be assessed using a plate reader. A low signal will indicate a higher percentage of specific lysis, since more of the targets were killed early on. A higher signal will indicate a lower percentage of specific lysis, since more of the target cells survived to the end of the assay. The manipulations of TOX2 levels will be compared with their respective controls, as well as an untransduced control that lacks CAR-19 and thus should show little-to-no specific lysis.

### Examine the Effects of TOX2 Levels on Proliferation in Response to Antigen

[0668] After the 14-day expansion, more CAR T cells will be thawed and stained for fluorescence activated cell sorting (FACS) based on the presence of CAR-19 plus viruses expressing shRNA for TOX2 or TOX2 cDNA. The sorted double-positive cells will be plated in a 1:1 co-culture with the K562 cell line that constitutively expresses either CD19 or mesothelin (a negative control). Every five days, fold change of the T cells will be calculated and K562 cells will be added to restore the ratio to 1:1. The re-stimulation will be repeated until all T cells begin to diminish. Comparing the fold increase in each condition will allow a determination of how well the cells can proliferate in response to antigen, an important property for T cells in responding to cancer.

### Examine the Effects of TOX2 on Anti-Tumor Immunity In Vivo

[0669] The aforementioned CAR T cell assays will be useful because they will allow examination of TOX2 in a human context. To further evaluate whether TOX2 has a biologically relevant effect, the levels of TOX2 will be manipulated in vivo. By introducing the CAR T cells into NOD-scid IL2rγnull mice that have been xenografted with a CD19+ leukemia, the effects of manipulating TOX2 levels on anti-tumor immunity can be assessed. CAR-expressing T cells with TOX2 knocked out by gene-disrupting sgRNA (CRISPR) will be compared with CAR cells containing control non-disrupting sgRNAs (mock CRISPR). Cells will be tested in competitive repopulation experiments using xenograft models of ALL (NALM-6).

[0670] Each animal will receive 1-2.5 million T cells by intravenous injection. Every 7-10 days, each mouse will be bled and number of CAR+ T cells, B-ALL (CD19+) and total human cells (CD45+) will be measured by TRU-Count beads. These mice will be monitored for at least 2 months, examining both their peripheral blood immune cell levels and their general health and appearance. Tumor burden is expected to peak within 21 days after inoculation without treatment. Successful tumor control will be verified by measuring disease burden using luciferase-expressing tumors. Live mice will be imaged bi-weekly for the duration of experiments using the IVIS-XR animal imaging system (Xenogen). Functional readouts of efficacy will be used to evaluate the effect of TOX2 deficiency on in vivo CAR T cell activity. Said readouts will include: 1) reduction of longitudinal tumor burden; 2) prolongation of overall survival and 3) the breadth as well as functional quality of transferred human CAR T cells.

[0671] For in vivo experiments, each experiment will consist of four treatment groups (unedited CAR T cells, n=10; TOX2 knockout CAR T cells, n=10; tumor plus untransduced T cells, n=5; tumor alone, n=5) for a total of 30 animals per experiment. One-way ANOVA will be used to compare the primary endpoint of 21-day tumor burden between groups followed by post-hoc tests. Additionally, associations between T cell proliferation and tumor burden will be assessed using Spearman rank coefficient. Longitudinal pattern will be modelled via mixed effects model. A time by treatment groups interaction term will be used to capture the differential trajectory across treatments. Overall survival curves will be evaluated using the Kaplan-Meier method and log-rank test. Assuming tumor burdens are roughly normally distributed with a 72 common variance after a log transformation, then 10 mice per group provides 80% power to detect a shift in the mean of 1.68 standard deviation (SD) using a two-sided t test with type I error rate of 0.05/5=0.01.

### Example 3: TOX2 Controls a Transcriptional Program of Immune-Related Genes

### Rationale

[0672] Although overexpression of TOX2 can activate the promoter of TBX21 (the T-BET gene) in a luciferase assay, TOX2 regulation of T-BET at the transcriptional level in T cells has not yet been fully elucidated. Examining changes in T-BET levels, as well as identifying other transcriptional targets of TOX2, will allow elucidation of the molecular mechanisms, e.g., catalyzed by TOX2. Additionally, it has been shown that an antibody against TOX2 can pull down oligonucleotides containing the promoter region of TBX21 in vitro, though TOX2 binding at or near TBX21—or any of its transcriptional targets—in T cells is currently under investigation. Identifying the binding patterns of TOX2 to DNA is of interest as well, to better understand whether TOX2 binds to DNA in a sequence-dependent or sequence-independent way. Examining how TOX2 binds chromatin will expand our understanding of the mechanisms of HMG-box proteins more broadly.

### Experiments

### Identify Transcriptional Targets of TOX2

[0673] TOX2 knockdown CAR-T cells at the end of the 14-day expansion will be harvested followed by qRT-PCR for TBX21 and PDCD1, in both the knockdown and the non-targeting control. To explore the role of TOX2 in other immune pathways, RNAseq will also be performed for genes that are differentially expressed in the knockdown. To identify immune-related pathways, gene ontology analysis (GO) and gene set enrichment analysis (GSEA) will be performed on the data.

### Examine Translational Effects of TOX2 on T-BET and PD-1

[0674] Control and TOX2 knockdown CAR T cells will be stained with antibodies against T-BET and PD-1, followed by quantification of the expression of these two proteins using previously optimized flow cytometry panels. This will allow assessment of whether changes in transcription of PDCD1 or TBX21 correspond to changes in protein expression. This will also allow determination of whether shRNA knockdown is sensitive enough to affect the transcriptome of the cells.

### Identify Binding Sites of TOX2

[0675] Chromatin IP (ChIP)-qPCR will be performed in normal CAR-T cells and in the TOX2 overexpression cells at the TBX21 locus to assess TOX2 binding. ChIP-seq for TOX2 will also be carried out, to assess if TOX2 binds to a specific motif. Peaks will be called using MACS2 and motifs will be searched using HOMER and SeqPos. This will enable the identification of potential direct transcriptional targets of TOX2 beyond T-BET. Gaining insight into how TOX2 binds DNA would help with, e.g., future experimental design, as well as provide further insight into the DNA binding patterns of HMG-box proteins. The RNA-seq and ChIP-seq datasets will be analyzed bioinformatically to check whether TOX2 binds at or near the promoter-TSS (transcriptional start site) region of additional genes differentially regulated in the knockdown and/or overexpression.

[0676] It is expected that levels of TBX21, which encodes T-BET, will be decreased in the TOX2 knockdown and that levels of PDCD1, which encodes PD-1, will be increased. TOX2 is highly expressed in TET2 knockdown, so comparing combined TOX2-TET2 knockdown to the TET2 knockdown could reveal genes that can be upregulated by TOX2.

### Example 4: TOX2 Levels in Patient T Cells are Predictive of Response to CAR-T Therapy

### Rationale

[0677] Though the levels of TOX2 mRNA were not measured in the patient profiled in Fraietta et al. (2018), the induction of central memory cells observed in this patient was mimicked by knocking down TET2 in vitro. As shown in Example 1 and FIG. 1, knockdown of TET2 resulted in upregulation of TOX2. This finding will be confirmed by examining levels of TOX2 in vivo in samples from clinical trials of CAR T therapy. Examining levels of TOX2 in these patient samples will provide an opportunity to confirm the in vitro findings and understand the role of TOX2 in the context of human cancer.

### Experiments

[0678] First, qRT-PCR will be performed for TOX2 in the patient samples, comparing pre- and post-infusion CAR T cells. This will allow the establishment of a baseline of TOX2 expression in cancer patients, as well as a determination of whether the process of in vivo expansion of CAR T cells has an impact on TOX2 expression. After quantifying the level of TOX2 expression, a determination as to whether upregulation of TOX2 is correlated with more robust responses to CAR T therapy will be made. RNAseq will also be performed in these same patient samples, to examine the transcriptome more broadly and identify other genes that may underlie positive responses to CAR T therapy.

[0679] It is expected that levels of TOX2 in pre-infusion CAR T cells will be low. However, in some embodiments, levels of TOX2 are expected to rise in post-infusion CAR T cells, due to, e.g., an upregulation during the process of memory cell differentiation. In some embodiments, the largest increase in TOX2 levels is expected to occur in patients who respond to therapy, e.g., complete responders or partial responders.

### EQUIVALENTS

[0680] The disclosures of each and every patent, patent application, and publication cited herein are hereby incorporated herein by reference in their entirety. While this invention has been disclosed with reference to specific embodiments, it is apparent that other embodiments and variations of this invention may be devised by others skilled in the art without departing from the true spirit and scope of the invention. The appended claims are intended to be construed to include all such embodiments and equivalent variations.

What is claimed is:

1. A modified immune effector cell
(a) genetically engineered to express a chimeric antigen receptor (CAR) comprising an antigen-binding domain, a transmembrane domain, and an intracellular signaling domain; and
(b) treated and/or genetically engineered to have an increased level, expression, and/or activity of a TOX family protein (“TOX^{hi} CAR cell”),
wherein the level, expression, and/or activity of the TOX family protein in said TOX^{hi} CAR cell is increased compared to a control cell, e.g., an immune effector cell having the following:
(i) a CAR-expressing immune effector cell, which is not treated and/or is not genetically engineered to have an increased level, expression, and/or activity of a TOX family protein as recited in (b); or
(ii) a non-CAR expressing immune effector cell, which is not treated and/or is not genetically engineered to have an increased level, expression, and/or activity of a TOX family protein as recited in (b).

2. The TOX^{hi} CAR cell of claim 1, wherein the TOX family protein is chosen from a TOX protein, TOX2 protein, TOX3 protein, or TOX4 protein, e.g., a human TOX protein, TOX2 protein, TOX3 protein, or TOX4 protein.

3. The TOX^{hi} CAR cell of claim 1 or 2, wherein the TOX family protein is a TOX2 protein.

4. The TOX^{hi} CAR cell of any of claims 1-3, wherein the TOX^{hi} CAR cell comprises a recombinant TOX2 nucleic acid molecule encoding a TOX2 protein, e.g., a recombinant TOX2 nucleic acid molecule encoding an amino acid sequence having at least 85% identity to SEQ ID NO: 2000, SEQ ID NO: 2001, SEQ ID NO: 2002 or SEQ ID NO: 2003, or a functional fragment thereof.

5. The TOX^{hi} CAR cell of claim 4, wherein the recombinant TOX2 nucleic acid molecule is expressed in the immune effector cell.

6. The TOX^{hi} CAR cell of any of claims 1-3, wherein the TOX family protein comprises a TOX2 protein comprising an amino acid sequence having at least 85% identity to SEQ ID NO: 2000, SEQ ID NO: 2001, SEQ ID NO: 2002 or SEQ ID NO: 2003, or a functional fragment thereof.

7. The TOX^{hi} CAR cell of claim 1 or claim 2, wherein the cell is treated to have an increased level, expression, and/or activity of a TOX family protein.

8. The TOX^{hi} CAR cell of claim 7, wherein the treating comprises contacting the cell with a TOX family protein modulator, e.g., an agent which increases the level, expression, and/or activity of a TOX family protein.

9. The TOX^{hi} CAR cell of claim 1 or claim 2, wherein the cell is genetically engineered to have an increased level, expression, and/or activity of a TOX family protein.

10. The TOX^{hi} CAR cell of any of claims 7-9, wherein the TOX family protein is chosen from a TOX protein, TOX2 protein, TOX3 protein, or TOX4 protein, e.g., a human TOX protein, TOX2 protein, TOX3 protein, or TOX4 protein.

11. The TOX^{hi} CAR cell of claim 10, wherein the TOX family protein is a TOX2 protein.

12. The TOX^{hi} CAR cell of claim 10 or 11, wherein the TOX^{hi} CAR cell comprises a recombinant TOX2 nucleic acid molecule encoding a TOX2 protein, e.g., a recombinant TOX2 nucleic acid molecule encoding an amino acid sequence having at least 85% identity to SEQ ID NO: 2000, SEQ ID NO: 2001, SEQ ID NO: 2002 or SEQ ID NO: 2003, or a functional fragment thereof.

13. The TOX^{hi} CAR cell of claim 12, wherein the recombinant TOX2 nucleic acid molecule is expressed in the immune effector cell.

14. The TOX^{hi} CAR cell of any of claims 7-11, wherein the TOX family protein comprises a TOX2 protein comprising an amino acid sequence having at least 85% identity to SEQ ID NO: 2000, SEQ ID NO: 2001, SEQ ID NO: 2002 or SEQ ID NO: 2003, or a functional fragment thereof.

15. The TOX^{hi} CAR cell of any of the preceding claims, wherein the control cell is not engineered to express a TOX2 protein, or is not treated, e.g., contacted with a TOX2 modulator.

16. The TOX^{hi} CAR cell of any of the preceding claims, wherein the modified immune effector cell and the control cell are from the same subject or from different subjects.

17. The TOX^{hi} CAR cell of claim 1, wherein the treating comprises contacting the cell with a TOX family protein modulator, e.g., an agent which increases the level, expression, and/or activity of a TOX family protein.

18. The TOX^{hi} CAR cell of claim 7 or 17, wherein the TOX2 modulator targets a regulator, e.g., an upstream regulator, of TOX2, optionally, wherein the TOX2 modulator is chosen from:
(i) a molecule that increases the transcription of TOX2 mRNA (e.g., a molecule that increases chromatin accessibility of the TOX2 promoter or a regulatory element thereof);
(ii) a molecule that increases the translation of TOX2 protein;
(iii) a molecule that increases the stability of TOX2, e.g., TOX2 mRNA or TOX2 protein;
(iv) a molecule that increases the activity of TOX2 protein, e.g., a DNA binding of the TOX2 protein; or
(v) a molecule that increases the amount, level and/or expression of TOX2, e.g., TOX2 mRNA or TOX2 protein, e.g., an inhibitor of an inhibitor of TOX2 (e.g., an inhibitor of a Tet family member (e.g., an inhibitor of a Tet2 protein)).

19. The TOX^{hi} CAR cell of claim 17 or 18, wherein the TOX2 modulator is selected from the group consisting of: an antibody molecule (e.g., an agonist antibody that binds a TOX2 modulator, or an antibody molecule that binds a TOX2 inhibitor); a low molecular weight compound, or a molecule targeting a direct or an indirect inhibitor of TOX2, e.g., a RNAi agent, a CRISPR, a TALEN, or a zinc finger nuclease targeting an inhibitor of TOX2, e.g., Tet2.

20. The TOX^{hi} CAR cell of any of claim 7 or 17-19, wherein the treating, e.g., contacting, occurs in vivo, in vitro, or ex vivo.

21. The TOX^{hi} CAR cell of any of the preceding claims, wherein the increased level, expression, and/or activity is measured by evaluating the transcription level of TOX2 mRNA, e.g., as detected using quantitative RT-PCR.

22. The TOX^{hi} CAR cell of any of the preceding claims, wherein the increased level, expression, and/or activity is measured by evaluating the protein level of TOX2, e.g., as detected using an immunoassay.

23. The TOX^{hi} CAR cell of any of the preceding claims, wherein the increased level, expression, and/or activity is measured by evaluating the activity of TOX2, e.g., a DNA binding activity of TOX2, e.g., as detected using chromatin IP (ChIP).

24. The TOX^{hi} CAR cell of any of the preceding claims, wherein the increased level, expression, and/or activity of TOX2 is measured by evaluating a target of TOX2 (e.g., a downstream target of TOX2, e.g., T-bet), or a pathway modulated, e.g., activated, by TOX2, e.g., as detected using quantitative RT-PCR.

25. A TOX^{hi} CAR cell population comprising a plurality of TOX^{hi} CAR cell of any of claims 1-24.

26. The TOX^{hi} CAR cell population of claim 25, wherein the modified immune effector cell population comprises at least about 10%, 20%, 30%, 40%, 50%, 60%, 70%, 80%, 90%, 95%, to about 100% TOX^{hi} CAR cell of any of claims 1-24.

27. The TOX^{hi} CAR cell population of claim 26, wherein the immune effector cell population is enriched for TOX^{hi} CAR-expressing immune effector cell, e.g., at least about 50%, 60%, 70%, 80%, 85%, 90%, 91%, 92%, 93%, 94%, 95%, 96%, 97%, 98%, 99% or 100% of the cells are TOX^{hi} CAR cell, e.g., at least about 50%, 60%, 70%, 80%, 85%, 90%, 91%, 92%, 93%, 94%, 95%, 96%, 97%, 98%, 99% or 100% of the cells have increased level, expression, and/or activity of TOX2.

28. The TOX^{hi} CAR cell population of any of claims 25-27, comprising a first population of TOX^{hi} CAR cells and a second population of immune effector cells, e.g., wherein the second population does not comprise TOX^{hi} CAR cells, e.g., the second population comprises cells that do not have increased level, expression, and/or activity of TOX2, e.g., the second population comprises cells that have a lower level, expression, and/or activity of TOX2 compared with the first population of TOX^{hi} CAR cells.

29. The TOX^{hi} CAR cell population of claim 28, wherein the second population of immune effector cells comprises CAR-expressing immune effector cells.

30. The TOX^{hi} CAR cell population of claim 29, wherein the first population of TOX^{hi} CAR cells and the second population of CAR-expressing immune effector cells comprise a CAR having the same antigen binding domain.

31. The TOX^{hi} CAR cell population of any of claims 28-30, further comprising a third population of immune effector cells, e.g., wherein the third population of cells does not express the CAR polypeptide and has increased level, expression, and/or activity of TOX2.

32. The TOX^{hi} CAR cell population of any of claims 25-27, comprising a first population of TOX^{hi} CAR cells and an additional population of immune effector cells, e.g., wherein the additional population of cells does not express the CAR polypeptide, and has increased level, expression, and/or activity of TOX2.

33. The TOX^{hi} CAR cell population of any of claims 25-32, wherein the population of cells has any one, two, three, four, five, or all of the following properties:
vii. improved immune effector cell function, e.g., improved T cell or NK cell function;
viii. an increased level, expression, and/or activity, e.g., effector function, of CAR-expressing cells having a central memory T cell phenotype, e.g., as described herein;
ix. increased proliferation, e.g., expansion, of CAR-expressing cells;
x. improved efficacy of CAR-expressing cells, e.g., improved target cell killing, cytokine secretion, amelioration of a symptom of a disease, or treatment of disease;
xi. increased T-bet level, expression, and/or activity; and/or
xii. reduced PD-1 level, expression, and/or activity,
optionally, wherein any one, or all of (i)-(vi) is compared to a control cell, e.g., an immune effector cell having the following:
a. a CAR-expressing immune effector cell, which is not treated and/or is not genetically engineered to have an increased level, expression, and/or activity of a TOX family protein; or
b. a non-CAR expressing immune effector cell, which is not treated and/or is not genetically engineered to have an increased level, expression, and/or activity of a TOX family protein.

34. The TOX^{hi} CAR cell population of claim 33, wherein the population of cells has an improved immune effector cell function, e.g., improved T cell or NK cell function, e.g., improved cytotoxic activity of T cells or NK cells, e.g., compared to the control cell.

35. The TOX^{hi} CAR cell population of claim 33 or 34, wherein the population of cells has an increased level, expression, and/or activity of CAR-expressing cells having a central memory T cell phenotype, e.g., CD4+ or CD8+ central memory T cells that are CD45RO+ CCR7+.

36. The TOX^{hi} CAR cell population of claim 33, wherein the increase in level, expression, and/or activity of CAR-expressing cells having a central memory T cell phenotype is at least 10%, 20%, 30%, 40%, 50%, 60%, 70%, 80%, 90%, 95%, 100% or greater, e.g., as measured by an assay of Example 1-4, compared to the control cell.

37. The TOX^{hi} CAR cell population of claim 33, wherein the population of cells has increased proliferation, e.g., expansion, e.g., by at least 1.1, 1.2, 1.3, 1.4, 1.5, 2, 3, 4, 5, 6, 7, 8, 9, 10, 20, 30, 40, 50 fold or more, e.g., as measured by an assay of Example 1-4, compared to the control cell.

38. The TOX^{hi} CAR cell population of claim 33, wherein the population of cells has improved efficacy, e.g., improved target cell killing, cytokine secretion, amelioration of a symptom of a disease, or treatment of disease; e.g., as measured by an assay of Example 1-4, compared to the control cell.

39. The TOX^{hi} CAR cell population of claim 33, wherein the population of cells has increased T-bet level, expression, and/or activity, e.g., an increase of at least 10%, 20%, 30%, 40%, 50%, 60%, 70%, 80%, 90%, 95%, 100% or greater, e.g., as measured by an assay of Example 1-4, compared to the control cell.

40. The TOX^{hi} CAR cell population of claim 33, wherein the population of cells has reduced PD-1 level, expression, and/or activity, e.g., a reduction of at least 5%, 10%, 20%, 40%, 60%, 80%, 90%, 100%, 200%, 300%, 500% or more, e.g., as measured by an assay of Example 1-4, compared to the control cell.

41. The TOX^{hi} CAR cell of any of claims 1-24, or the TOX^{hi} CAR cell population of any of claims 25-40, wherein the population of cells is cultured, e.g., expanded, e.g., for at least 1, 2, 3, 4, 5, 6, 7, 8, 9, 10, 11, 12, 13, 14, 15, 16, 17, 18, 19, 20, or 21 days or for 1-7, 7-14, or 14-21 days.

42. A method of making, e.g., manufacturing, a modified immune effector cell (e.g., a population of immune effector cells comprising modified immune effector cells), said method comprising:
i) providing an immune effector cell (e.g., a population of immune effector cells, e.g., T cells or NK cells);
ii) genetically engineering the immune effector cell or the population of immune effector cells of i) to express a chimeric antigen receptor (CAR) comprising an antigen-binding domain, a transmembrane domain, and an intracellular signaling domain;
iii) treating, e.g., contacting, and/or genetically engineering the immune effector cell or population of immune effector cells of i), or the immune effector cell or population of immune effector cells of ii), to have an increased level, expression, and/or activity of a TOX family protein, wherein the level, expression, and/or activity of the TOX family protein is increased compared to a control cell,
iv) maintaining the population of immune effector cells under conditions that allow expression of the CAR polypeptide, and increased expression, level, and/or activity of the TOX family protein,
thereby making the TOX^{hi} CAR-expressing immune effector cell.

43. The method of claim 42, wherein step (ii) is performed before step (iii), step (ii) is performed after step (iii), or step (ii) and step (iii) are performed concurrently.

44. A method of increasing the therapeutic efficacy of a CAR-expressing cell, e.g., a population of CAR-expressing cells, comprising:
a) providing a population of CAR-expressing immune effector cells, e.g., CAR-expressing T cells or NK cells;
b) treating, e.g., contacting, and/or genetically engineering the population of immune effector cells of (a) to have an increased level, expression, and/or activity of a TOX family protein, wherein the level, expression, and/or activity of the TOX family protein is increased compared to a control cell; and
c) maintaining the population of immune effector cells under conditions that allow expression of the CAR polypeptide, and increased level, expression, and/or activity of the TOX family protein,
thereby increasing the therapeutic efficacy of the CAR-expressing immune effector cell.

45. The method of claim 44, wherein the method results in a TOX^{hi} CAR cell having an increased level, expression, and/or activity of a TOX-family protein, compared to a control cell, e.g., as described herein.

46. The method of any of claims 42-45, wherein the TOX family protein is chosen from a TOX protein, a TOX2 protein, a TOX3 protein, or a TOX4 protein, e.g., a human TOX protein, TOX2 protein, TOX3 protein or TOX4 protein.

47. The method of claim 46, wherein the TOX family protein is a TOX2 protein.

48. The method of claim 46 or 47, wherein the TOX2 protein comprises a recombinant nucleic acid molecule encoding a TOX2 protein, e.g., a recombinant TOX2 nucleic acid molecule encoding an amino acid sequence having at least 85% identity to SEQ ID NO: 2000, SEQ ID NO: 2001, SEQ ID NO: 2002, or SEQ ID NO: 2003 or a functional fragment thereof.

49. The method of claim 48, wherein the recombinant TOX2 nucleic acid molecule is expressed in the immune effector cell.

50. The method of claim 46 or 47, wherein the TOX family protein comprises a TOX2 protein comprising an amino acid molecule having at least 85% identity to SEQ ID NO: 2000, SEQ ID NO: 2001, SEQ ID NO: 2002, or SEQ ID NO: 2003, or a functional fragment thereof.

51. The method of any of claims 42-45, wherein the step of treating comprises contacting the cell with a TOX2 molecule (e.g., TOX2 protein), or a TOX family protein modulator (e.g., an agent which increases the level, expression, and/or activity of a TOX family protein, e.g., a TOX2 modulator).

52. The method of any of claims 42-45, wherein the step of genetically engineering the population of immune effector cells of to have an increased level, expression, and/or activity of a TOX family protein comprises contacting the cell with a TOX2 molecule (e.g., TOX2 protein), or a TOX family protein modulator, e.g., an agent which increases the level, expression, and/or activity of a TOX family protein.

53. The method of any of claims 42-52, wherein the control cell is not engineered to express a TOX2 protein, or is not treated, e.g., contacted with a TOX2 modulator.

54. The method of any of claims 42-53, wherein the modified immune effector cell and the control cell are from the same subject.

55. The method of any of claims 42-53, wherein the modified immune effector cell and the control cell are from different subjects.

56. The method of claim 51 or 52, wherein the TOX family protein modulator, e.g., TOX2 modulator, results in increased level, expression, and/or activity of TOX2.

57. The method of claim 56, the TOX2 modulator targets a regulator, e.g., an upstream regulator, of TOX2, optionally, wherein the TOX2 modulator is:
(i) a molecule that increases the transcription of TOX2 mRNA (e.g., a molecule that increases chromatin accessibility of the TOX2 promoter or a regulatory element thereof);
(ii) a molecule that increases the translation of TOX2 protein;
(iii) a molecule that increases the stability of TOX2, e.g., TOX2 mRNA or TOX2 protein;
(iv) a molecule that increases the activity of TOX2 protein, e.g., a DNA binding of the TOX2 protein; or
(v) a molecule that increases the amount, level and/or expression of TOX2, e.g., TOX2 mRNA or TOX2 protein, e.g., an inhibitor of an inhibitor of TOX2 (e.g., an inhibitor of a Tet family member (e.g., an inhibitor of a Tet2 protein)).

58. The method of claim 56 or 57, wherein the TOX2 modulator is selected from the group consisting of: an antibody molecule (e.g., an agonist antibody that binds a TOX2 modulator, or an antibody molecule that binds a TOX2 inhibitor), a low molecular weight compound, or a molecule targeting a direct or an indirect inhibitor of TOX2, e.g., a RNAi agent, a CRISPR, a TALEN, or a zinc finger nuclease targeting an inhibitor of TOX2, e.g., Tet2.

59. The method of any of claims 42-58, wherein the increased level, expression, and/or activity is measured by evaluating the transcription level of TOX2 mRNA, e.g., as detected using quantitative RT-PCR.

60. The method of any of claims 42-58, wherein the increased level, expression, and/or activity is measured by evaluating the protein level of TOX2, e.g., as detected using an immunoassay.

61. The method of any of claims 42-58, wherein the increased level, expression, and/or activity is measured by evaluating the activity of TOX2, e.g., a DNA binding activity of TOX2, e.g., as detected using chromatin IP (ChIP).

62. The method of any of claims 42-58, wherein the increased level, expression, and/or activity of TOX2 is measured by evaluating a target of TOX2 (e.g., a downstream target of TOX2, e.g., T-bet), or a pathway modulated, e.g., activated, by TOX2, e.g., as detected using quantitative RT-PCR.

63. The method of any of claims 42-62, wherein the immune effector cell population is contacted with the TOX family protein, (e.g., the TOX2 protein or the TOX family modulator, e.g., TOX2 modulator), in vivo, in vitro, or ex vivo.

64. The method of any of claims 42-63, wherein the population of TOX^{hi} CAR cells is substantially enriched for TOX2, e.g., at least about 50%, 60%, 70%, 80%, 85%, 90%, 91%, 92%, 93%, 94%, 95%, 96%, 97%, 98%, 99% or 100% of the cells are TOX^{hi} CAR cell, e.g., at least about 50%, 60%, 70%, 80%, 85%, 90%, 91%, 92%, 93%, 94%, 95%, 96%, 97%, 98%, 99% or 100% of the cells have increased level, expression, and/or activity of TOX2.

65. The method of claim 64, wherein the population of TOX^{hi} CAR cells comprises a first population of TOX^{hi} CAR cells and a second population of CAR-expressing immune effector cells, e.g., wherein the second population does not comprise TOX^{hi} CAR cell, e.g., the second population comprises cells that do not have increased level, expression, and/or activity of TOX2, e.g., the second population comprises cells that have a lower level, expression, and/or activity of TOX2 compared with the first population of TOX^{hi} CAR cell.

66. The method of claim 65, wherein the second population of immune effector cells comprises CAR-expressing immune effector cells.

67. The method of claim 66, wherein the first population of TOX^{hi} CAR cell and the second population of CAR-expressing immune effector cells comprise a CAR having the same antigen binding domain.

68. The method of any of claims 65-67, wherein the population of TOX^{hi} CAR cells comprises a third population of immune effector cells, e.g., wherein the third population of cells does not express the CAR polypeptide and has increased level, expression, and/or activity of TOX2.

69. The method of claim 64, wherein the population of TOX^{hi} CAR cells comprises a first population of TOX^{hi} CAR cells and an additional population of immune effector cells, e.g., wherein the additional population of cells does not express the CAR polypeptide, and has increased level, expression, and/or activity of TOX2.

70. The method of any of claims 42-69, wherein the method results in any one, two, three, four, five, or all of the following:
i. improved immune effector cell function, e.g., improved T cell or NK cell function;
ii. an increased level, expression, and/or activity of CAR-expressing cells having a central memory T cell phenotype, e.g., as described herein;
iii. increased proliferation, e.g., expansion, of CAR-expressing cells;
iv. improved efficacy of CAR-expressing cells, e.g., improved target cell killing, cytokine secretion, amelioration of a symptom of a disease, or treatment of disease;
v. increased T-bet level, expression, and/or activity; and/or
vi. reduced PD-1 level, expression, and/or activity,
optionally, wherein any one, or all of (i)-(vi) is compared to a control cell, e.g., an immune effector cell having the following:
a. a CAR-expressing immune effector cell, which is not treated and/or is not genetically engineered to have an increased level, expression, and/or activity of a TOX family protein; or
b. a non-CAR expressing immune effector cell, which is not treated and/or is not genetically engineered to have an increased level, expression, and/or activity of a TOX family protein.

71. The method of claim 70, wherein the method results in improved immune effector cell function, e.g., improved T cell or NK cell function, e.g., improved cytotoxic activity of T cells or NK cells, e.g., compared to the control cell.

72. The method of claim 70 or 71, wherein the method results in an increased level, expression, and/or activity of TOX^{hi} CAR cell having a central memory T cell phenotype, e.g., CD4+ or CD8+ central memory T cells that are CD45RO+ CCR7+.

73. The method of claim 70, wherein the increase in level, expression, and/or activity of TOX^{hi} CAR cell having a central memory T cells is at least 10%, 20%, 30%, 40%, 50%, 60%, 70%, 80%, 90%, 95%, 100% or greater, e.g., as measured by an assay of Example 1-4, compared to the control cell.

74. The method of claim 70, wherein the method results in increased proliferation, e.g., expansion, of TOX^{hi} CAR cell, e.g., by at least 1.1, 1.2, 1.3, 1.4, 1.5, 2, 3, 4, 5, 6, 7, 8, 9, 10, 20, 30, 40, 50 fold or more, e.g., as measured by an assay of Example 1-4, compared to the control cell.

75. The method of claim 70, wherein the method results in improved efficacy of TOX^{hi} CAR cell, e.g., improved target cell killing, cytokine secretion, amelioration of a symptom of a disease, or treatment of disease; e.g., as measured by an assay of Example 1-4, compared to the control cell.

76. The method of claim 70, wherein the method results in increased T-bet level, expression, and/or activity, e.g., an increase of at least 10%, 20%, 30%, 40%, 50%, 60%, 70%, 80%, 90%, 95%, 100% or greater, e.g., as measured by an assay of Example 1-4, compared to the control cell.

77. The method of claim 70, wherein the method results in reduced PD-1 level, expression, and/or activity, e.g., a reduction of at least 5%, 10%, 20%, 40%, 60%, 80%, 90%, 100%, 200%, 300%, 500% or more, e.g., as measured by an assay of Example 1-4, compared to the control cell.

78. The method of any of claims 42-77, comprising culturing, e.g., expanding, the population of TOX^{hi} CAR cell, e.g., for at least 1, 2, 3, 4, 5, 6, 7, 8, 9, 10, 11, 12, 13, 14, 15, 16, 17, 18, 19, 20, or 21 days or for 1-7, 7-14, or 14-21 days.

79. The TOX^{hi} CAR cell of any of claim 1-24 or 41, the population of TOX^{hi} CAR cells of any of claims 25-41, or the method of any of claims 42-78, wherein the nucleic acid molecule encoding the CAR polypeptide, and the nucleic acid molecule encoding the TOX family protein, or TOX2 modulator, are disposed on a single nucleic acid molecule, e.g., a viral vector, e.g., a lentivirus vector.

80. The TOX^{hi} CAR cell of any of claim 1-24 or 41, the population of TOX^{hi} CAR cells of any of claims 25-41, or the method of any of claims 42-78, wherein the nucleic acid molecule encoding the CAR polypeptide and the nucleic acid molecule encoding the TOX family protein, or TOX2 modulator, are disposed on separate nucleic acid molecules e.g., separate viral vectors, e.g., separate lentivirus vectors.

81. The TOX^{hi} CAR cell, the population of TOX^{hi} CAR cell, or the method of claim 79, further comprising selecting for, e.g., enriching for, TOX2 and/or CAR-expressing cells.

82. A method of treating a subject in need thereof, comprising administering to the subject an effective amount of a population of immune effector cells, genetically engineered to express a Chimeric Antigen Receptor (CAR), said population of immune effector cells treated and/or genetically engineered to have an increased level, expression, and/or activity of a TOX family protein (“population of TOX^{hi} CAR cell”),
wherein the CAR comprises an antigen-binding domain, a transmembrane domain, and an intracellular signaling domain,
wherein the level, expression, and/or activity of the TOX family protein in said population of TOX^{hi} CAR cell is increased compared to a control cell, e.g., an immune effector cell having the following:
(i) a CAR-expressing immune effector cell, which is not treated and/or is not genetically engineered to have an increased level, expression, and/or activity of a TOX family protein; or
(ii) a non-CAR expressing immune effector cell, which is not treated and/or is not genetically engineered to have an increased level, expression, and/or activity of a TOX family protein.

83. A population of immune effector cells expressing a Chimeric Antigen Receptor (CAR), for use in a method of treating a subject in need thereof, the method comprising administering to said subject an effective amount of a population of immune effector cells genetically engineered to express a CAR, said population of immune effector cells treated and/or genetically engineered to have an increased level, expression, and/or activity of a TOX family protein (“population of TOX^{hi} CAR cell”),
wherein the CAR comprises an antigen-binding domain, a transmembrane domain, and an intracellular signaling domain,
wherein the level, expression, and/or activity of the TOX family protein in said population of TOX^{hi} CAR cell is increased compared to a control cell, e.g., an immune effector cell having the following:
(i) a CAR-expressing immune effector cell, which is not treated and/or is not genetically engineered to have an increased level, expression, and/or activity of a TOX family protein; or
(ii) a non-CAR expressing immune effector cell, which is not treated and/or is not genetically engineered to have an increased level, expression, and/or activity of a TOX family protein.

84. The method of claim 82, or the population of TOX^{hi} CAR cells for use of claim 83, wherein the TOX family protein is chosen from a TOX protein, TOX2 protein, TOX3 protein or TOX4 protein, e.g., a human TOX protein, TOX2 protein, TOX3 protein or TOX4 protein.

85. The method of claim 82 or 84, or the population of TOX^{hi} CAR cells for use of claim 83 or 84, wherein the population of TOX^{hi} CAR cells comprises at least about 10%, 20%, 30%, 40%, 50%, 60%, 70%, 80%, 90%, 95%, to about 100% TOX^{hi} CAR cell.

86. The method of any of claim 82 or 84-85, or the population of TOX^{hi} CAR cells for use of any of claims 83-85, wherein the population of TOX^{hi} CAR cells is enriched for TOX^{hi} CAR-expressing immune effector cells, e.g., at least about 50%, 60%, 70%, 80%, 85%, 90%, 91%, 92%, 93%, 94%, 95%, 96%, 97%, 98%, 99% or 100% of the cells are TOX^{hi} CAR cells, e.g., at least about 50%, 60%, 70%, 80%, 85%, 90%, 91%, 92%, 93%, 94%, 95%, 96%, 97%, 98%, 99% or 100% of the cells have increased level, expression, and/or activity of TOX2.

87. The method of any of claim 82 or 84-86, or the population of TOX^{hi} CAR cells for use of any of claims 83-86, wherein the population of TOX^{hi} CAR cells comprises a first population of TOX^{hi} CAR cells and a second population of CAR-expressing immune effector cells, e.g., wherein the second population does not comprise TOX^{hi} CAR cells, e.g., the second population comprises cells that do not have increased level, expression, and/or activity of TOX2, e.g., the second population comprises cells that have a lower level, expression, and/or activity of TOX2 compared with the first population of TOX^{hi} CAR cells.

88. The method or the cells for use of claim 87, wherein the second population of immune effector cells comprises CAR-expressing immune effector cells.

89. The method of claim 87 or 88, or the population of TOX^{hi} CAR cells for use of claim 87 or 88, wherein the first population of TOX^{hi} CAR cells and the second population of CAR-expressing immune effector cells comprise a CAR having the same antigen binding domain.

90. The method of any of claims 87-89, or the population of TOX^{hi} CAR cells for use of any of claims 87-89, wherein the population of TOX^{hi} CAR cells comprises a third population of immune effector cells, e.g., wherein the third population of cells does not express the CAR polypeptide and has increased level, expression, and/or activity of TOX2.

91. The method of any of claim 82 or 84-90, or the population of TOX^{hi} CAR cells for use of any of claims 83-90, wherein the method further comprises administering an additional population of CAR-expressing cells, wherein the additional population of CAR-expressing cells does not have an increased level, expression, and/or activity of TOX2.

92. The method of any of claim 82 or 84-91, or the population of TOX^{hi} CAR cells for use of any of claims 83-91, wherein the population of TOX^{hi} CAR cells is autologous or allogeneic.

93. The method of any of claim 82 or 84-92, or the population of TOX^{hi} CAR cells for use of any of claims 83-92, wherein the subject has been previously administered, or is receiving a population of CAR-expressing cells, e.g., a population of CAR-expressing cells that does not have an increased level and/or activity of TOX2.

94. The method, or the population of TOX^{hi} CAR cells for use of claim 93, further comprising acquiring a measure of TOX2 status in the subject, e.g., a measure of the level, expression, and/or activity of TOX2.

95. The method, or the population of TOX^{hi} CAR cells for use of claim 94, wherein an increase in the level, expression, and/or activity of TOX2 in a sample from the subject is indicative of the subject's increased responsiveness to the population of CAR-expressing cells, e.g., the population of CAR-expressing cells that does not have an increased level, expression, and/or activity of TOX2, e.g., increased responsiveness compared to a reference level (e.g., a subject not having an increased level, expression, and/or activity of TOX2).

96. The method, or the population of TOX^{hi} CAR cells for use of claim 94, wherein a decrease in the level, expression, and/or activity of TOX2 in a sample from the subject is indicative of the subject's decreased responsiveness to the population of CAR-expressing cell, e.g., the population of CAR-expressing cells that does not have an increased level, expression, and/or activity of TOX2 e.g., decreased responsiveness compared to a reference value (e.g., a subject having an increased level, expression, and/or activity of TOX2).

97. The method, or the population of TOX^{hi} CAR cells for use of any of claims 93-96, wherein the level, expression, and/or activity of TOX2 is compared to a control level, e.g., a reference level, wherein the control level is chosen from:
a TOX2 level, expression, and/or activity obtained from a healthy subject or a subject who has not been administered the population of CAR-expressing cells;
a TOX2 level, expression, and/or activity obtained from a population of immune effector cells from the subject which has not been genetically engineered and/or treated, to express a CAR or TOX2; or
a TOX2 level, expression, and/or activity obtained from the subject prior to administration of the population of CAR-expressing cells.

98. The method, or the population of TOX^{hi} CAR cells for use of claim 97, wherein the level, expression, and/or activity of TOX2 is measured in a sample from the subject prior to genetically engineering or treating the CAR-expressing immune effector cells with a TOX family protein (e.g., a TOX2 protein), or a TOX modulator (e.g., a TOX2 modulator).

99. The method, or the population of TOX^{hi} CAR cells for use of claim 97, wherein the level, expression, and/or activity of TOX2 is measured in a sample from the subject after genetically engineering or treating the CAR-expressing immune effector cells with a TOX family protein (e.g., a TOX2 protein), or a TOX modulator (e.g., a TOX2 modulator).

100. The method, or the population of TOX^{hi} CAR cells for use of any of claims 93-99, wherein the status of TOX2 is evaluated 1 week, 1 month, 2 months, 3 months, 4 months or 6 months after administration of the CAR-expressing cells, e.g., the CAR-expressing cell that does not have an increased level and/or activity of TOX2.

101. The method of any of claims 87-100, or the population of TOX^{hi} CAR cells for use of any of claims 87-100, wherein the first population of cells (e.g., the population of TOX^{hi} CAR cell), is detectable, e.g., persists, in a sample from the subject, for at least 1 week, 1 month, 2 months, 3 months, 4 months, 6 months, 8 months, 10 months, 12 months, or 24 months after administration of the population of TOX^{hi} CAR cells to the subject.

102. The method of any of claims 87-100, or the population of TOX^{hi} CAR cells for use of any of claims 87-100, wherein the second population of cells (e.g., the population of CAR-expressing cells that does not have an increased level, expression, and/or activity of TOX2 compared to the first population), is detectable, e.g., persists, for at least 1 week, 1 month, 2 months, 3 months, 4 months, 6 months, 8 months, 10 months, 12 months, or 24 months after administration of the population of TOX^{hi} CAR cells to the subject.

103. The method of any of claims 87-100, or the population of TOX^{hi} CAR cells for use of any of claims 87-100, wherein the third population of cells (e.g., the population of cells that does not express the CAR polypeptide and has increased level, expression, and/or activity of TOX2) is detectable, e.g., persists, for at least 1 week, 1 month, 2 months, 3 months, 4 months, 6 months, 8 months, 10 months, 12 months, or 24 months after administration of the population of TOX^{hi} CAR cells to the subject.

104. A method of treating a subject in need thereof, comprising administering to the subject an effective amount of a population of Chimeric Antigen Receptor (CAR)-expressing immune effector cells, wherein the CAR comprises an antigen-binding domain, a transmembrane domain, and an intracellular signaling domain, the method comprising:
acquiring a measure of TOX2 status in the subject, e.g., a measure of the level, expression, and/or activity of TOX2,
responsive to an increased level, expression, and/or activity of TOX2,
administering a population of CAR-expressing immune cells to the subject.

105. A method of treating a subject in need thereof, comprising administering to the subject an effective amount of a population of immune effector cells genetically engineered to express a Chimeric Antigen Receptor (CAR), said population of immune effector cells treated and/or genetically engineered to have an increased level, expression, and/or activity of a TOX-family protein (“population of TOX^{hi} CAR cell”),
wherein the CAR comprises an antigen-binding domain, a transmembrane domain, and an intracellular signaling domain,
wherein the level, expression, and/or activity of the TOX family protein in said population of TOX^{hi} CAR cells is increased compared to a control cell, the method comprising:
acquiring a measure of TOX2 status in the subject, e.g., a measure of the level, expression, and/or activity of TOX2,
responsive to a decreased level, expression, and/or activity of TOX2,
administering a population of TOX^{hi} CAR cells to the subject.

106. A method of evaluating a subject in need thereof, or monitoring the effectiveness of a population of CAR-expressing cells in a subject, wherein the CAR comprises an antigen-binding domain, a transmembrane domain, and an intracellular signaling domain, the method comprising:
acquiring a measure of TOX2 status in the subject (e.g., in a sample from the subject), e.g., a measure of the level, expression, and/or activity of TOX2 in a sample from the subject,
wherein an increase in the level, expression, and/or activity of TOX2 is indicative of the subject's increased responsiveness to the population of CAR-expressing cells, and a decrease in the level, expression, and/or activity of TOX2 is indicative of the subject's decreased responsiveness to the population of CAR-expressing cells.

107. The method of claim 106, wherein responsive to an increased level, expression, and/or activity of TOX2, the method comprises administering a population of CAR-expressing immune cells to the subject.

108. The method of claim 106, wherein responsive to a decreased level, expression, and/or activity of TOX2, the method comprises administering a population of CAR-expressing immune cells treated and/or genetically engineered to have an increased level expression, and/or activity of a TOX family protein (“population of TOX^{hi} CAR cell”) to the subject, wherein the level, expression, and/or activity of the TOX family protein in said TOX^{hi} CAR cell is increased compared to control cell.

109. The method of any of claims 105-108, wherein the control cell comprises an immune effector cell having the following:
(i) a CAR-expressing immune effector cell, which is not treated and/or is not genetically engineered to have an increased level, expression, and/or activity of a TOX family protein; or
(ii) a non-CAR expressing immune effector cell, which is not treated and/or is not genetically engineered to have an increased level, expression, and/or activity of a TOX family protein.

110. The method of any of claims 94-109, wherein the measure of the level, expression, and/or activity of TOX2 is acquired in an apheresis sample from the subject, e.g., in a population of immune effector cells prior to treating and/or genetically engineering said population of immune effector cells to have an increased level, expression, and/or activity of a TOX family protein, e.g., prior to treating, e.g., contacting with a TOX2 protein or TOX modulator (e.g., TOX2 modulator).

111. The method of any of claims 94-109, wherein the measure of the level, expression, and/or activity of TOX2 is acquired in a manufactured TOX^{hi} CAR-expressing cell product sample, e.g., in a population of immune effector cells treated and/or genetically engineered to have an increased level, expression, and/or activity of a TOX family protein, e.g., after treating (e.g., contacting) with a TOX2 protein or TOX modulator (e.g., TOX2 modulator).

112. The method of any of claims 94-111, wherein the subject has been previously administered, or is receiving, a population of CAR-expressing cells.

113. The method of claim 112, wherein the previously administered population of CAR-expressing cells has a lower level, expression, and/or activity of TOX2 than the population of TOX^{hi} CAR cell.

114. The method of any of claims 94-113, wherein the status of TOX2 is evaluated 1 week, 1 month, 2 months, 3 months, 4 months or 6 months after administration of the CAR-expressing cell therapy.

115. The method of any of claims 94-114, wherein the level, expression, and/or activity of TOX2 is compared to a control level, e.g., a reference level, wherein the control level is chosen from:
a TOX2 level, expression, and/or activity obtained from a healthy subject or a subject who has not been administered the population of CAR-expressing cells;
a TOX2 level, expression, and/or activity obtained from a population of immune effector cells from the subject which has not been genetically engineered and/or treated to express a CAR or TOX2; or
a TOX2 level, expression, and/or activity obtained from the subject prior to administration of the population of CAR-expressing cells.

116. A method of treating a subject in need thereof, comprising administering to said subject an effective amount of a population of Chimeric Antigen Receptor (CAR)-expressing immune effector cells, and a TOX2 molecule (e.g., TOX2 protein) or TOX2 modulator, wherein the CAR comprises an antigen-binding domain, a transmembrane domain, and an intracellular signaling domain.

117. A population of Chimeric Antigen Receptor (CAR)-expressing immune effector cells for use in a method of treating a subject in need thereof, the method comprising administering to said subject an effective amount of the population of CAR-expressing cells and a TOX2 molecule (e.g., a TOX2 protein) or TOX2 modulator, wherein the CAR comprises an antigen-binding domain, a transmembrane domain, and an intracellular signaling domain.

118. A method of making, e.g., manufacturing, a population of Chimeric Antigen Receptor (CAR)-expressing immune effector cells, comprising contacting said population of CAR-expressing immune effector cells ex vivo with a TOX2 molecule (e.g., TOX2 protein) or TOX2 modulator, wherein the CAR comprises an antigen-binding domain, a transmembrane domain, and an intracellular signaling domain.

119. A method of treating a subject in need thereof, comprising administering to said subject an effective amount of the population of TOX^{hi} CAR cells of any of claims 25-41.

120. A population of TOX^{hi} CAR cells for use in a method of treating a subject in need thereof, the method comprising administering to said subject an effective amount of the population of cells of any of claims 25-41.

121. The TOX^{hi} CAR cell, the population of TOX^{hi} CAR cells, the method, or the population of TOX^{hi} CAR cells for use, of any of the preceding claims, wherein the antigen-binding domain binds to a tumor antigen selected from a group consisting of: CD19, TSHR, CD123, CD22, CD30, CD171, CS-1, CLL-1, CD33, EGFRvIII, GD2, GD3, BCMA, Tn Ag, PSMA, ROR1, FLT3, FAP, TAG72, CD38, CD44v6, CEA, EPCAM, B7H3, KIT, IL-13Ra2, Mesothelin, IL-11Ra, PSCA, PRSS21, VEGFR2, LewisY, CD24, PDGFR-beta, SSEA-4, CD20, Folate receptor alpha, ERBB2 (Her2/neu), MUC1, EGFR, NCAM, Prostase, PAP, ELF2M, Ephrin B2, IGF-I receptor, CAIX, LMP2, gp100, bcr-abl, tyrosinase, EphA2, Fucosyl GM1, sLe, GM3, TGS5, HMWMAA, o-acetyl-GD2, Folate receptor beta, TEM1/CD248, TEM7R, CLDN6, GPRCSD, CXORF61, CD97, CD179a, ALK, Polysialic acid, PLAC1, GloboH, NY-BR-1, UPK2, HAVCR1, ADRB3, PANX3, GPR20, LY6K, OR51E2, TARP, WT1, NY-ESO-1, LAGE-1a, MAGE-A1, legumain, HPV E6, E7, MAGE A1, ETV6-AML, sperm protein 17, XAGE1, Tie 2, MAD-CT-1, MAD-CT-2, Fos-related antigen 1, p53, p53 mutant, prostein, survivin and telomerase, PCTA-1/Galectin 8, MelanA/MART1, Ras mutant, hTERT, sarcoma translocation breakpoints, ML-IAP, ERG (TMPRSS2 ETS fusion gene), NA17, PAX3, Androgen receptor, Cyclin B 1, MYCN, RhoC, TRP-2, CYP1B1, BORIS, SART3, PAX5, OY-TES1, LCK, AKAP-4, SSX2, RAGE-1, human telomerase reverse transcriptase, RU1, RU2, intestinal carboxyl esterase, mut hsp70-2, CD79a, CD79b, CD72, LAIR1, FCAR, LILRA2, CD300LF, CLEC12A, BST2, EMR2, LY75, GPC3, FCRL5, and IGLL1.

122. The TOX^{hi} CAR cell, the population of TOX^{hi} CAR cell, the method, or the population of TOX^{hi} CAR cells for use, of any of the preceding claims, wherein the tumor antigen is CD19, mesothelin, BCMA, CLL-1, CD33, EGFRvIII, CD20, CD22 or CD123.

123. The TOX^{hi} CAR cell, the population of TOX^{hi} CAR cells, the method, or the population of TOX^{hi} CAR cells for use, of any of the preceding claims, wherein the transmembrane domain comprises:
an amino acid sequence having at least one, two or three modifications but not more than 20, 10 or 5 modifications of the amino acid sequence of SEQ ID NO: 1026,
a sequence with 95-99% identity to the amino acid sequence of SEQ ID NO: 1026; or
the amino acid sequence of SEQ ID NO: 1026.

124. The TOX^{hi} CAR cell, the population of TOX^{hi} CAR cells, the method, or the population of TOX^{hi} CAR cells for use, of any of the preceding claims, wherein the antigen binding domain is connected to the transmembrane domain by a hinge region, wherein said hinge region comprises the amino acid sequence of SEQ ID NO: 1018 or SEQ ID NO: 1020, or a sequence with 95-99% identity thereto.

125. The TOX^{hi} CAR cell, the population of TOX^{hi} CAR cells, the method, or the population of TOX^{hi} CAR cells for use, of any of the preceding claims, wherein the intracellular signaling domain comprises: a primary signaling domain; a costimulatory domain; or a primary signaling domain and a costimulatory signaling domain.

126. The TOX^{hi} CAR cell, the population of TOX^{hi} CAR cells, the method, or the population of TOX^{hi} CAR cells for use, of any of the preceding claims, wherein the primary signaling domain comprises a functional signaling domain of a protein chosen from CD3 zeta, CD3 gamma, CD3 delta, CD3 epsilon, common FcR gamma (FCER1G), FcR beta (Fc Epsilon Rib), CD79a, CD79b, Fcgamma RIIa, DAP10, or DAP12.

127. The TOX^{hi} CAR cell, the population of TOX^{hi} CAR cells, the method, or the population of TOX^{hi} CAR cells for use, of any of the preceding claims, wherein the primary signaling domain comprises:
an amino acid sequence having at least one, two or three modifications but not more than 20, 10 or 5 modifications of the amino acid sequence of SEQ ID NO: 1034 or SEQ ID NO: 1037,
a sequence with 95-99% identity to the amino acid sequence of SEQ ID NO: 1034 or SEQ ID NO: 1037; or
the amino acid sequence of SEQ ID NO:1034 or SEQ ID NO: 1037.

128. The TOX^{hi} CAR cell, the population of TOX^{hi} CAR cells, the method, or the population of TOX^{hi} CAR cells for use, of any of the preceding claims, wherein the costimulatory signaling domain comprises a functional signaling domain of a protein selected from the group consisting of CD27, CD28, 4-1BB (CD137), OX40, CD30, CD40, PD-1, ICOS, lymphocyte function-associated antigen-1 (LFA-1), CD2, CD7, LIGHT, NKG2C, B7-H3, a ligand that specifically binds with CD83, CDS, ICAM-1, GITR, BAFFR, HVEM (LIGHTR), SLAMF7, NKp80 (KLRF1), CD160, CD19, CD4, CD8alpha, CD8beta, IL2R beta, IL2R gamma, IL7R alpha, ITGA4, VLA1, CD49a, ITGA4, IA4, CD49D, ITGA6, VLA-6, CD49f, ITGAD, CD11d, ITGAE, CD103, ITGAL, CD11a, LFA-1, ITGAM, CD11b, ITGAX, CD11c, ITGB1, CD29, ITGB2, CD18, LFA-1, ITGB7, TNFR2, TRANCE/RANKL, DNAM1 (CD226), SLAMF4 (CD244, 2B4), CD84, CD96 (Tactile), CEACAM1, CRTAM, Ly9 (CD229), CD160 (BY55), PSGL1, CD100 (SEMA4D), CD69, SLAMF6 (NTB-A, Ly108), SLAM (SLAMF1, CD150, IPO-3), BLAME (SLAMF8), SELPLG (CD162), LTBR, LAT, GADS, SLP-76, PAG/Cbp, NKp44, NKp30, NKp46, and NKG2D.

129. The TOX^{hi} CAR cell, the population of TOX^{hi} CAR cell, the method, or the population of TOX^{hi} CAR cells for use, of any of the preceding claims, wherein the costimulatory signaling domain comprises
an amino acid sequence having at least one, two or three modifications but not more than 20, 10 or 5 modifications of the amino acid sequence of SEQ ID NO:1029 or SEQ ID NO: 1032,
a sequence with 95-99% identity to the amino acid sequence of SEQ ID NO:1029 or SEQ ID NO: 1032, or
the amino acid sequence of SEQ ID NO: 1029 or SEQ ID NO: 1032.

130. The TOX^{hi} CAR cell, the population of TOX^{hi} CAR cells, the method, or the population of TOX^{hi} CAR cells for use, of any of the preceding claims, wherein the intracellular domain comprises the sequence of SEQ ID NO: 1029 or SEQ ID NO: 1032, and the sequence of SEQ ID NO: 1034 or SEQ ID NO: 1037, wherein the sequences comprising the intracellular signaling domain are expressed in the same frame and as a single polypeptide chain.

131. The TOX^{hi} CAR cell, the population of TOX^{hi} CAR cells, the method, or the population of TOX^{hi} CAR cells for use, of any of the preceding claims, further comprising a leader sequence comprising the sequence of SEQ ID NO: 1015.

132. The TOX^{hi} CAR cell, the population of TOX^{hi} CAR cells, the method, or the population of TOX^{hi} CAR cells for use, of any of the preceding claims, wherein the immune effector cell is a T cell or an NK cell, optionally wherein the immune effector cell is a human cell.

133. The TOX^{hi} CAR cell, the population of TOX^{hi} CAR cells, the method, or the population of TOX^{hi} CAR cells for use of claim 132, wherein the immune effector cell is a T cell, e.g., a CD4+ T cell, a CD8+ T cell, a CD3+ T cell, or a combination thereof.

134. The method of any of claims 82, 84-116, 118-119, 121-133 or the population of TOX^{hi} CAR cells for use of any of claim 83-103, 117, or 120-133, wherein the subject has a disease associated with expression of a tumor antigen, e.g., a proliferative disease, a precancerous condition, a cancer, and a non-cancer related indication associated with expression of the tumor antigen.

135. The method, or the population of TOX^{hi} CAR cells for use of claim 134, wherein the cancer is a hematologic cancer chosen from one or more of chronic lymphocytic leukemia (CLL), acute leukemias, acute lymphoid leukemia (ALL), B-cell acute lymphoid leukemia (B-ALL), T-cell acute lymphoid leukemia (T-ALL), chronic myelogenous leukemia (CML), B cell prolymphocytic leukemia, blastic plasmacytoid dendritic cell neoplasm, Burkitt's lymphoma, diffuse large B cell lymphoma, follicular lymphoma, hairy cell leukemia, small cell- or a large cell-follicular lymphoma, malignant lymphoproliferative conditions, MALT lymphoma, mantle cell lymphoma, marginal zone lymphoma, multiple myeloma, myelodysplasia and myelodysplastic syndrome, non-Hodgkin's lymphoma, Hodgkin's lymphoma, plasmablastic lymphoma, plasmacytoid dendritic cell neoplasm, Waldenstrom macroglobulinemia, or pre-leukemia.

136. The method, or the population of TOX^{hi} CAR cells for use of claim 134, wherein the cancer is selected from the group consisting of colon cancer, rectal cancer, renal-cell carcinoma, liver cancer, non-small cell carcinoma of the lung, cancer of the small intestine, cancer of the esophagus, melanoma, bone cancer, pancreatic cancer, skin cancer, cancer of the head or neck, cutaneous or intraocular malignant melanoma, uterine cancer, ovarian cancer, rectal cancer, cancer of the anal region, stomach cancer, testicular cancer, uterine cancer, carcinoma of the fallopian tubes, carcinoma of the endometrium, carcinoma of the cervix, carcinoma of the vagina, carcinoma of the vulva, Hodgkin's Disease, non-Hodgkin's lymphoma, cancer of the endocrine system, cancer of the thyroid gland, cancer of the parathyroid gland, cancer of the adrenal gland, sarcoma of soft tissue, cancer of the urethra, cancer of the penis, solid tumors of childhood, cancer of the bladder, cancer of the kidney or ureter, carcinoma of the renal pelvis, neoplasm of the central nervous system (CNS), primary CNS lymphoma, tumor angiogenesis, spinal axis tumor, brain stem glioma, pituitary adenoma, Kaposi's sarcoma, epidermoid cancer, squamous cell cancer, T-cell lymphoma, environmentally induced cancers, combinations of said cancers, and metastatic lesions of said cancers.

137. A vector comprising a sequence encoding a CAR polypeptide and/or a sequence encoding a TOX protein (e.g., a TOX2 protein) or a TOX modulator (e.g., a TOX2 modulator).

138. The vector of claim 137, wherein the TOX2 modulator targets a regulator, e.g., an upstream regulator, of TOX2.

139. The vector of claim 137, wherein the TOX2 protein comprises a recombinant nucleic acid molecule encoding a TOX2 protein, e.g., a nucleic acid molecule encoding an amino acid sequence having at least 85% identity to SEQ ID NO: 2000, SEQ ID NO: 2001, SEQ ID NO: 2002, or SEQ ID NO: 2003 or a functional fragment thereof.

140. The vector of claim any of claims 137-139, wherein the sequence encoding the CAR polypeptide and the sequence encoding the TOX2 protein or the TOX2 modulator are disposed in a single vector, e.g., a viral vector, e.g., a lentiviral vector.

141. The vector of claim any of claims 137-139, wherein the sequence encoding the CAR polypeptide and the sequence encoding the TOX2 protein or the TOX2 modulator are disposed in separate vectors, e.g., separate viral vectors, e.g., separate lentiviral vectors.

142. The vector of any of claims 137-141, wherein the sequence encoding the CAR and the sequence encoding the TOX2 protein or the TOX2 modulator separated by a sequence for an internal ribosomal entry site (IRES), or a self-cleaving peptide, e.g., a 2A peptide.

143. The vector of any of claim 137-140 or 142, wherein the vector comprises a bicistronic vector or a multicistronic vector.

144. The vector of claim 143, wherein the vector comprises:
an internal ribosomal entry site (IRES);
a self-cleaving peptide, e.g., a 2A peptide;
a splice donor and a splice acceptor; and/or
an N-terminal intein splicing region and a C-terminal intein splicing region.

145. A pharmaceutical composition comprising the population of cells of any of claims 25-40, and a pharmaceutically acceptable excipient.

146. A population of TOX^{hi} CAR cells of any of claims 25-40, for use in the manufacture of a medicament for treating a disease, e.g., a cancer.

The application's sequence listing, which the Patent Office published only in electronic form, follows.

SEQUENCE LISTING (2589 sequences)

SEQ ID NO: 1-12 - skipped (12 entries)

SEQ ID NO: 13 - DNA, 521 bp, Artificial Sequence
  source: /note="Description of Artificial Sequence: Synthetic polynucleotide"
agcttatggtgccccaaccccaacgcggaaaaggttccgtcgggacccaaacgcgtccctgcgccgacgagacccgcaccaaggccctttgcgtcgccgcggctgggacccagagcgtgtaagaagtgcaggcaagcgtcgcagtgggcctagaagcggcgatgggaacacccggggggccgctgcgaaggacgaggcggggattcagcccttccaaggaacgccaagcgccgcacggcctgcactatttgccttcggcgtgcagagtgatcatgggagcgtctgcctgtcgcggtccctcgttaccgtcgcgcggctggcgctacccgacaccggttatcgccgacgagtcgtcccgcgcggctctcgtcgccggcccttccccgccacgccctccgccccacaccccgccatcacacccgggacaaggacgggcgcgccacaaggcgtaagacgttcggaggcctcgcgtgcagccgtcagccgagggagcaactggcttagtggctggagagaggggt

SEQ ID NO: 14 - DNA, 726 bp, Artificial Sequence
  source: /note="Description of Artificial Sequence: Synthetic polynucleotide"
gacatccagatgacacagactacatcctccctgtctgcctctctgggagacagagtcaccatcagttgcagggcaagtcaggacattagtaaatatttaaattggtatcagcagaaaccagatggaactgttaaactcctgatctaccatacatcaagattacactcaggagtcccatcaaggttcagtggcagtgggtctggaacagattattctctcaccattagcaacctggagcaagaagatattgccacttacttttgccaacagggtaatacgcttccgtacacgttcggaggggggaccaagctggagatcacaggtggcggtggctcgggcggtggtgggtcgggtggcggcggatctgaggtgaaactgcaggagtcaggacctggcctggtggcgccctcacagagcctgtccgtcacatgcactgtctcaggggtctcattacccgactatggtgtaagctggattcgccagcctccacgaaagggtctggagtggctgggagtaatatggggtagtgaaaccacatactataattcagctctcaaatccagactgaccatcatcaaggacaactccaagagccaagttttcttaaaaatgaacagtctgcaaactgatgacacagccatttactactgtgccaaacattattactacggtggtagctatgctatggactactggggccaaggaacctcagtcaccgtctcctca

SEQ ID NO: 15 - protein, 242 aa, Artificial Sequence
  source: /note="Description of Artificial Sequence: Synthetic polypeptide"
DIQMTQTTSSLSASLGDRVTISCRASQDISKYLNWYQQKPDGTVKLLIYHTSRLHSGVPSRFSGSGSGTDYSLTISNLEQEDIATYFCQQGNTLPYTFGGGTKLEITGGGGSGGGGSGGGGSEVKLQESGPGLVAPSQSLSVTCTVSGVSLPDYGVSWIRQPPRKGLEWLGVIWGSETTYYNSALKSRLTIIKDNSKSQVFLKMNSLQTDDTAIYYCAKHYYYGGSYAMDYWGQGTSVTVSS

SEQ ID NO: 16-22 - skipped (7 entries)

SEQ ID NO: 23 - DNA, 66 bp, Artificial Sequence
  source: /note="Description of Artificial Sequence: Synthetic oligonucleotide"
ggaagcggagctactaacttcagcctgctgaagcaggctggagacgtggaggagaaccctggacct

SEQ ID NO: 24 - protein, 22 aa, Artificial Sequence
  source: /note="Description of Artificial Sequence: Synthetic peptide"
GSGATNFSLLKQAGDVEENPGP

SEQ ID NO: 25 - DNA, 1395 bp, Artificial Sequence
  source: /note="Description of Artificial Sequence: Synthetic polynucleotide"
gacatccagatgacacagactacatcctccctgtctgcctctctgggagacagagtcaccatcagttgcagggcaagtcaggacattagtaaatatttaaattggtatcagcagaaaccagatggaactgttaaactcctgatctaccatacatcaagattacactcaggagtcccatcaaggttcagtggcagtgggtctggaacagattattctctcaccattagcaacctggagcaagaagatattgccacttacttttgccaacagggtaatacgcttccgtacacgttcggaggggggaccaagctggagatcacaggtggcggtggctcgggcggtggtgggtcgggtggcggcggatctgaggtgaaactgcaggagtcaggacctggcctggtggcgccctcacagagcctgtccgtcacatgcactgtctcaggggtctcattacccgactatggtgtaagctggattcgccagcctccacgaaagggtctggagtggctgggagtaatatggggtagtgaaaccacatactataattcagctctcaaatccagactgaccatcatcaaggacaactccaagagccaagttttcttaaaaatgaacagtctgcaaactgatgacacagccatttactactgtgccaaacattattactacggtggtagctatgctatggactactggggccaaggaacctcagtcaccgtctcctcaaccacgacgccagcgccgcgaccaccaacaccggcgcccaccatcgcgtcgcagcccctgtccctgcgcccagaggcgtgccggccagcggcggggggcgcagtgcacacgagggggctggacttcgcctgtgatatctacatctgggcgcccttggccgggacttgtggggtccttctcctgtcactggttatcaccctttactgcaaacggggcagaaagaaactcctgtatatattcaaacaaccatttatgagaccagtacaaactactcaagaggaagatggctgtagctgccgatttccagaagaagaagaaggaggatgtgaactgagagtgaagttcagcaggagcgcagacgcccccgcgtacaagcagggccagaaccagctctataacgagctcaatctaggacgaagagaggagtacgatgttttggacaagagacgtggccgggaccctgagatggggggaaagccgagaaggaagaaccctcaggaaggcctgtacaatgaactgcagaaagataagatggcggaggcctacagtgagattgggatgaaaggcgagcgccggaggggcaaggggcacgatggcctttaccagggtctcagtacagccaccaaggacacctacgacgcccttcacatgcaggccctgccccctcgc

SEQ ID NO: 26 - protein, 465 aa, Artificial Sequence
  source: /note="Description of Artificial Sequence: Synthetic polypeptide"
DIQMTQTTSSLSASLGDRVTISCRASQDISKYLNWYQQKPDGTVKLLIYHTSRLHSGVPSRFSGSGSGTDYSLTISNLEQEDIATYFCQQGNTLPYTFGGGTKLEITGGGGSGGGGSGGGGSEVKLQESGPGLVAPSQSLSVTCTVSGVSLPDYGVSWIRQPPRKGLEWLGVIWGSETTYYNSALKSRLTIIKDNSKSQVFLKMNSLQTDDTAIYYCAKHYYYGGSYAMDYWGQGTSVTVSSTTTPAPRPPTPAPTIASQPLSLRPEACRPAAGGAVHTRGLDFACDIYIWAPLAGTCGVLLLSLVITLYCKRGRKKLLYIFKQPFMRPVQTTQEEDGCSCRFPEEEEGGCELRVKFSRSADAPAYKQGQNQLYNELNLGRREEYDVLDKRRGRDPEMGGKPRRKNPQEGLYNELQKDKMAEAYSEIGMKGERRRGKGHDGLYQGLSTATKDTYDALHMQALPPR

SEQ ID NO: 27-38 - skipped (12 entries)

SEQ ID NO: 39 - protein, 246 aa, Artificial Sequence
  source: /note="Description of Artificial Sequence: Synthetic polypeptide"
QVQLVESGGGLVQPGRSLRLSCAASGFTFSNYAMSWVRQAPGKGLGWVSGISRSGENTYYADSVKGRFTISRDNSKNTLYLQMNSLRDEDTAVYYCARSPAHYYGGMDVWGQGTTVTVSSASGGGGSGGRASGGGGSDIVLTQSPGTLSLSPGERATLSCRASQSISSSFLAWYQQKPGQAPRLLIYGASRRATGIPDRFSGSGSGTDFTLTISRLEPEDSAVYYCQQYHSSPSWTFGQGTKLEIK

SEQ ID NO: 40 - protein, 244 aa, Artificial Sequence
  source: /note="Description of Artificial Sequence: Synthetic polypeptide"
QVQLVESGGGLVQPGRSLRLSCAASGFTFDDYAMHWVRQAPGKGLEWVSGISWNSGSIGYADSVKGRFTISRDNAKNSLYLQMNSLRAEDTALYYCSVHSFLAYWGQGTLVTVSSASGGGGSGGRASGGGGSDIVMTQTPLSLPVTPGEPASISCRSSQSLLHSNGYNYLDWYLQKPGQSPQLLIYLGSNRASGVPDRFSGSGSGTDFTLKISRVEAEDVGVYYCMQALQTPYTFGQGTKVEIK

SEQ ID NO: 41 - protein, 243 aa, Artificial Sequence
  source: /note="Description of Artificial Sequence: Synthetic polypeptide"
EVQLLESGGGLVQPGGSLRLSCAVSGFALSNHGMSWVRRAPGKGLEWVSGIVYSGSTYYAASVKGRFTISRDNSRNTLYLQMNSLRPEDTAIYYCSAHGGESDVWGQGTTVTVSSASGGGGSGGRASGGGGSDIVMTQTPLSLSVTPGQPASISCKSSQSLLRNDGKTPLYWYLQKAGQPPQLLIYEVSNRFSGVPDRFSGSGSGTDFTLKISRVEAEDVGAYYCMQNIQFPSFGGGTKLEIK

SEQ ID NO: 42 - protein, 249 aa, Artificial Sequence
  source: /note="Description of Artificial Sequence: Synthetic polypeptide"
QVQLVQSGAEVRKTGASVKVSCKASGYIFDNFGINWVRQAPGQGLEWMGWINPKNNNTNYAQKFQGRVTITADESTNTAYMEVSSLRSEDTAVYYCARGPYYYQSYMDVWGQGTMVTVSSASGGGGSGGRASGGGGSDIVMTQTPLSLPVTPGEPASISCRSSQSLLHSNGYNYLNWYLQKPGQSPQLLIYLGSKRASGVPDRFSGSGSGTDFTLHITRVGAEDVGVYYCMQALQTPYTFGQGTKLEIK

SEQ ID NO: 43 - protein, 246 aa, Artificial Sequence
  source: /note="Description of Artificial Sequence: Synthetic polypeptide"
QVQLQESGGGLVQPGGSLRLSCAASGFTFSSDAMTWVRQAPGKGLEWVSVISGSGGTTYYADSVKGRFTISRDNSKNTLYLQMNSLRAEDTAVYYCAKLDSSGYYYARGPRYWGQGTLVTVSSASGGGGSGGRASGGGGSDIQLTQSPSSLSASVGDRVTITCRASQSISSYLNWYQQKPGKAPKLLIYGASTLASGVPARFSGSGSGTHFTLTINSLQSEDSATYYCQQSYKRASFGQGTKVEIK

SEQ ID NO: 44 - protein, 247 aa, Artificial Sequence
  source: /note="Description of Artificial Sequence: Synthetic polypeptide"
QVQLVQSGAEVKKPGASVKVSCKASGYTFSNYGITWVRQAPGQGLEWMGWISAYNGNTNYAQKFQGRVTMTRNTSISTAYMELSSLRSEDTAVYYCARGPYYYYMDVWGKGTMVTVSSASGGGGSGGRASGGGGSEIVMTQSPLSLPVTPGEPASISCRSSQSLLYSNGYNYVDWYLQKPGQSPQLLIYLGSNRASGVPDRFSGSGSGTDFKLQISRVEAEDVGIYYCMQGRQFPYSFGQGTKVEIK

SEQ ID NO: 45 - protein, 238 aa, Artificial Sequence
  source: /note="Description of Artificial Sequence: Synthetic polypeptide"
EVQLLETGGGLVQPGGSLRLSCAVSGFALSNHGMSWVRRAPGKGLEWVSGIVYSGSTYYAASVKGRFTISRDNSRNTLYLQMNSLRPEDTAIYYCSAHGGESDVWGQGTTVTVSSASGGGGSGGRASGGGGSEIVLTQSPATLSVSPGESATLSCRASQSVSSNLAWYQQKPGQAPRLLIYGASTRASGIPDRFSGSGSGTDFTLTISSLQAEDVAVYYCQQYGSSLTFGGGTKVEIK

SEQ ID NO: 46 - protein, 239 aa, Artificial Sequence
  source: /note="Description of Artificial Sequence: Synthetic polypeptide"
EVQLVETGGGLVQPGGSLRLSCAVSGFALSNHGMSWVRRAPGKGLEWVSGIVYSGSTYYAASVKGRFTISRDNSRNTLYLQMNSLRPEDTAIYYCSAHGGESDVWGQGTTVTVSSASGGGGSGGRASGGGGSEIVMTQSPATLSVSPGERATLSCRASQSVSSKLAWYQQKPGQAPRLLMYGASIRATGIPDRFSGSGSGTEFTLTISSLEPEDFAVYYCQQYGSSSWTFGQGTKVEIK

SEQ ID NO: 47 - protein, 241 aa, Artificial Sequence
  source: /note="Description of Artificial Sequence: Synthetic polypeptide"
EVQLVETGGGVVQPGGSLRLSCAVSGFALSNHGMSWVRRAPGKGLEWVSGIVYSGSTYYAASVKGRFTISRDNSRNTLYLQMNSLRPEDTAIYYCSAHGGESDVWGQGTTVTVSSASGGGGSGGRASGGGGSEIVLTQSPGTLSLSPGERATLSCRASQSVGSTNLAWYQQKPGQAPRLLIYDASNRATGIPDRFSGGGSGTDFTLTISRLEPEDFAVYYCQQYGSSPPWTFGQGTKVEIK

SEQ ID NO: 48 - protein, 239 aa, Artificial Sequence
  source: /note="Description of Artificial Sequence: Synthetic polypeptide"
QVQLVESGGGLVKPGGSLRLSCAASGFTFSDYYMSWIRQAPGKGLEWVSYISSSGSTIYYADSVKGRFTISRDNAKNSLYLQMNSLRAEDTAVYYCARESGDGMDVWGQGTTVTVSSASGGGGSGGRASGGGGSDIQMTQSPSSLSASVGDRVTITCRASQSISSYLNWYQQKPGKAPKLLIYAASSLQSGVPSRFSGSGSGTDFTLTISSLQPEDFATYYCQQSYTLAFGQGTKVDIK

SEQ ID NO: 49 - protein, 239 aa, Artificial Sequence
  source: /note="Description of Artificial Sequence: Synthetic polypeptide"
EVQLVESGGGLVQPGGSLRLSCAVSGFALSNHGMSWVRRAPGKGLEWVSGIVYSGSTYYAASVKGRFTISRDNSRNTLYLQMNSLRPEDTAIYYCSAHGGESDVWGQGTTVTVSSASGGGGSGGRASGGGGSDIQLTQSPSSLSASVGDRVTITCRASQSISSYLNWYQQKPGKAPKLLIYAASSLQSGVPSRFSGSGSGTDFTLTISSLQPEDFATYYCQQSYSTPYTFGQGTKVEIK

SEQ ID NO: 50 - protein, 246 aa, Artificial Sequence
  source: /note="Description of Artificial Sequence: Synthetic polypeptide"
QVQLVQSGGGLVKPGGSLRLSCAASGFTFSDYYMSWIRQAPGKGLEWVSYISSSGNTIYYADSVKGRFTISRDNAKNSLYLQMNSLRAEDTAVYYCARSTMVREDYWGQGTLVTVSSASGGGGSGGRASGGGGSDIVLTQSPLSLPVTLGQPASISCKSSESLVHNSGKTYLNWFHQRPGQSPRRLIYEVSNRDSGVPDRFTGSGSGTDFTLKISRVEAEDVGVYYCMQGTHWPGTFGQGTKLEIK

SEQ ID NO: 51 - protein, 239 aa, Artificial Sequence
  source: /note="Description of Artificial Sequence: Synthetic polypeptide"
QVQLVESGGGLVQPGGSLRLSCAVSGFALSNHGMSWVRRAPGKGLEWVSGIVYSGSTYYAASVKGRFTISRDNSRNTLYLQMNSLRPEDTAIYYCSAHGGESDVWGQGTTVTVSSASGGGGSGGRASGGGGSDIRLTQSPSPLSASVGDRVTITCQASEDINKFLNWYHQTPGKAPKLLIYDASTLQTGVPSRFSGSGSGTDFTLTINSLQPEDIGTYYCQQYESLPLTFGGGTKVEIK

SEQ ID NO: 52 - protein, 240 aa, Artificial Sequence
  source: /note="Description of Artificial Sequence: Synthetic polypeptide"
EVQLVETGGGLVQPGGSLRLSCAVSGFALSNHGMSWVRRAPGKGLEWVSGIVYSGSTYYAASVKGRFTISRDNSRNTLYLQMNSLRPEDTAIYYCSAHGGESDVWGQGTTVTVSSASGGGGSGGRASGGGGSETTLTQSPATLSVSPGERATLSCRASQSVGSNLAWYQQKPGQGPRLLIYGASTRATGIPARFSGSGSGTEFTLTISSLQPEDFAVYYCQQYNDWLPVTFGQGTKVEIK

SEQ ID NO: 53 - protein, 241 aa, Artificial Sequence
  source: /note="Description of Artificial Sequence: Synthetic polypeptide"
EVQLVESGGGLVQPGGSLRLSCAVSGFALSNHGMSWVRRAPGKGLEWVSGIVYSGSTYYAASVKGRFTISRDNSRNTLYLQMNSLRPEDTAIYYCSAHGGESDVWGQGTTVTVSSASGGGGSGGRASGGGGSEIVLTQSPGTLSLSPGERATLSCRASQSIGSSSLAWYQQKPGQAPRLLMYGASSRASGIPDRFSGSGSGTDFTLTISRLEPEDFAVYYCQQYAGSPPFTFGQGTKVEIK

SEQ ID NO: 54 - DNA, 738 bp, Artificial Sequence
  source: /note="Description of Artificial Sequence: Synthetic polynucleotide"
caagtgcaactcgtggaatctggtggaggactcgtgcaacccggaagatcgcttagactgtcgtgtgccgccagcgggttcactttctcgaactacgcgatgtcctgggtccgccaggcacccggaaagggactcggttgggtgtccggcatttcccggtccggcgaaaatacctactacgccgactccgtgaagggccgcttcaccatctcaagggacaacagcaaaaacaccctgtacttgcaaatgaactccctgcgggatgaagatacagccgtgtactattgcgcccggtcgcctgcccattactacggcggaatggacgtctggggacagggaaccactgtgactgtcagcagcgcgtcgggtggcggcggctcagggggtcgggcctccggggggggagggtccgacatcgtgctgacccagtccccgggaaccctgagcctgagcccgggagagcgcgcgaccctgtcatgccgggcatcccagagcattagctcctcctttctcgcctggtatcagcagaagcccggacaggccccgaggctgctgatctacggcgctagcagaagggctaccggaatcccagaccggttctccggctccggttccgggaccgatttcacccttactatctcgcgcctggaacctgaggactccgccgtctactactgccagcagtaccactcatccccgtcgtggacgttcggacagggcaccaagctggagattaag

SEQ ID NO: 55 - DNA, 732 bp, Artificial Sequence
  source: /note="Description of Artificial Sequence: Synthetic polynucleotide"
caagtgcaactcgtcgaatccggtggaggtctggtccaacctggtagaagcctgagactgtcgtgtgcggccagcggattcacctttgatgactatgctatgcactgggtgcggcaggccccaggaaagggcctggaatgggtgtcgggaattagctggaactccgggtccattggctacgccgactccgtgaagggccgcttcaccatctcccgcgacaacgcaaagaactccctgtacttgcaaatgaactcgctcagggctgaggataccgcgctgtactactgctccgtgcattccttcctggcctactggggacagggaactctggtcaccgtgtcgagcgcctccggcggcgggggctcgggtggacgggcctcgggcggaggggggtccgacatcgtgatgacccagaccccgctgagcttgcccgtgactcccggagagcctgcatccatctcctgccggtcatcccagtcccttctccactccaacggatacaactacctcgactggtacctccagaagccgggacagagccctcagcttctgatctacctggggtcaaatagagcctcaggagtgccggatcggttcagcggatctggttcgggaactgatttcactctgaagatttcccgcgtggaagccgaggacgtgggcgtctactactgtatgcaggcgctgcagaccccctataccttcggccaagggacgaaagtggagatcaag

SEQ ID NO: 56 - DNA, 729 bp, Artificial Sequence
  source: /note="Description of Artificial Sequence: Synthetic polynucleotide"
gaagtgcaattgttggaatctggaggaggacttgtgcagcctggaggatcactgagactttcgtgtgcggtgtcaggcttcgccctgagcaaccacggcatgagctgggtgcggagagccccggggaagggtctggaatgggtgtccgggatcgtctactccggttcaacttactacgccgcaagcgtgaagggtcgcttcaccatttcccgcgataactcccggaacaccctgtacctccaaatgaactccctgcggcccgaggacaccgccatctactactgttccgcgcatggaggagagtccgatgtctggggacagggcactaccgtgaccgtgtcgagcgcctcggggggaggaggctccggcggtcgcgcctccggggggggtggcagcgacattgtgatgacgcagactccactctcgctgtccgtgaccccgggacagcccgcgtccatctcgtgcaagagctcccagagcctgctgaggaacgacggaaagactcctctgtattggtacctccagaaggctggacagcccccgcaactgctcatctacgaagtgtcaaatcgcttctccggggtgccggatcggttttccggctcgggatcgggcaccgacttcaccctgaaaatctccagggtcgaggccgaggacgtgggagcctactactgcatgcaaaacatccagttcccttccttcggcggcggcacaaagctggagattaag

SEQ ID NO: 57 - DNA, 747 bp, Artificial Sequence
  source: /note="Description of Artificial Sequence: Synthetic polynucleotide"
caagtccaactcgtccagtccggcgcagaagtcagaaaaaccggtgctagcgtgaaagtgtcctgcaaggcctccggctacattttcgataacttcggaatcaactgggtcagacaggccccgggccaggggctggaatggatgggatggatcaaccccaagaacaacaacaccaactacgcacagaagttccagggccgcgtgactatcaccgccgatgaatcgaccaataccgcctacatggaggtgtcctccctgcggtcggaggacactgccgtgtattactgcgcgaggggcccatactactaccaaagctacatggacgtctggggacagggaaccatggtgaccgtgtcatccgcctccggtggtggaggctccggggggcgggcttcaggaggcggaggaagcgatattgtgatgacccagactccgcttagcctgcccgtgactcctggagaaccggcctccatttcctgccggtcctcgcaatcactcctgcattccaacggttacaactacctgaattggtacctccagaagcctggccagtcgccccagttgctgatctatctgggctcgaagcgcgcctccggggtgcctgaccggtttagcggatctgggagcggcacggacttcactctccacatcacccgcgtgggagcggaggacgtgggagtgtactactgtatgcaggcgctgcagactccgtacacattcggacagggcaccaagctggagatcaag

SEQ ID NO: 58 - DNA, 738 bp, Artificial Sequence
  source: /note="Description of Artificial Sequence: Synthetic polynucleotide"
caagtgcaacttcaagaatcaggcggaggactcgtgcagcccggaggatcattgcggctctcgtgcgccgcctcgggcttcaccttctcgagcgacgccatgacctgggtccgccaggccccggggaaggggctggaatgggtgtctgtgatttccggctccgggggaactacgtactacgccgattccgtgaaaggtcgcttcactatctcccgggacaacagcaagaacaccctttatctgcaaatgaattccctccgcgccgaggacaccgccgtgtactactgcgccaagctggactcctcgggctactactatgcccggggtccgagatactggggacagggaaccctcgtgaccgtgtcctccgcgtccggcggaggagggtcgggagggcgggcctccggcggcggcggttcggacatccagctgacccagtccccatcctcactgagcgcaagcgtgggcgacagagtcaccattacatgcagggcgtcccagagcatcagctcctacctgaactggtaccaacagaagcctggaaaggctcctaagctgttgatctacggggcttcgaccctggcatccggggtgcccgcgaggtttagcggaagcggtagcggcactcacttcactctgaccattaacagcctccagtccgaggattcagccacttactactgtcagcagtcctacaagcgggccagcttcggacagggcactaaggtcgagatcaag

SEQ ID NO: 59 - DNA, 741 bp, Artificial Sequence
  source: /note="Description of Artificial Sequence: Synthetic polynucleotide"
caagtccaactggtccagagcggtgcagaagtgaagaagcccggagcgagcgtgaaagtgtcctgcaaggcttccgggtacaccttctccaactacggcatcacttgggtgcgccaggccccgggacagggcctggaatggatggggtggatttccgcgtacaacggcaatacgaactacgctcagaagttccagggtagagtgaccatgactaggaacacctccatttccaccgcctacatggaactgtcctccctgcggagcgaggacaccgccgtgtactattgcgcccggggaccatactactactacatggatgtctgggggaaggggactatggtcaccgtgtcatccgcctcgggaggcggcggatcaggaggacgcgcctctggtggtggaggatcggagatcgtgatgacccagagccctctctccttgcccgtgactcctggggagcccgcatccatttcatgccggagctcccagtcacttctctactccaacggctataactacgtggattggtacctccaaaagccgggccagagcccgcagctgctgatctacctgggctcgaacagggccagcggagtgcctgaccggttctccgggtcgggaagcgggaccgacttcaagctgcaaatctcgagagtggaggccgaggacgtgggaatctactactgtatgcagggccgccagtttccgtactcgttcggacagggcaccaaagtggaaatcaag

SEQ ID NO: 60 - DNA, 714 bp, Artificial Sequence
  source: /note="Description of Artificial Sequence: Synthetic polynucleotide"
gaagtgcaattgctcgaaactggaggaggtctggtgcaacctggaggatcacttcgcctgtcctgcgccgtgtcgggctttgccctgtccaaccatggaatgagctgggtccgccgcgcgccggggaagggcctcgaatgggtgtccggcatcgtctactccggctccacctactacgccgcgtccgtgaagggccggttcacgatttcacgggacaactcgcggaacaccctgtacctccaaatgaattcccttcggccggaggatactgccatctactactgctccgcccacggtggcgaatccgacgtctggggccagggaaccaccgtgaccgtgtccagcgcgtccgggggaggaggaagcgggggtagagcatcgggtggaggcggatcagagatcgtgctgacccagtcccccgccaccttgagcgtgtcaccaggagagtccgccaccctgtcatgccgcgccagccagtccgtgtcctccaacctggcttggtaccagcagaagccggggcaggcccctagactcctgatctatggggcgtcgacccgggcatctggaattcccgataggttcagcggatcgggctcgggcactgacttcactctgaccatctcctcgctgcaagccgaggacgtggctgtgtactactgtcagcagtacggaagctccctgactttcggtggcgggaccaaagtcgagattaag

SEQ ID NO: 61 - DNA, 717 bp, Artificial Sequence
  source: /note="Description of Artificial Sequence: Synthetic polynucleotide"
gaagtgcaattggtggaaactggaggaggacttgtgcaacctggaggatcattgagactgagctgcgcagtgtcgggattcgccctgagcaaccatggaatgtcctgggtcagaagggcccctggaaaaggcctcgaatgggtgtcagggatcgtgtactccggttccacttactacgccgcctccgtgaaggggcgcttcactatctcacgggataactcccgcaataccctgtacctccaaatgaacagcctgcggccggaggataccgccatctactactgttccgcccacggtggagagtctgacgtctggggccagggaactaccgtgaccgtgtcctccgcgtccggcggtggagggagcggcggccgcgccagcggcggcggaggctccgagatcgtgatgacccagagccccgctactctgtcggtgtcgcccggagaaagggcgaccctgtcctgccgggcgtcgcagtccgtgagcagcaagctggcttggtaccagcagaagccgggccaggcaccacgcctgcttatgtacggtgcctccattcgggccaccggaatcccggaccggttctcggggtcggggtccggtaccgagttcacactgaccatttcctcgctcgagcccgaggactttgccgtctattactgccagcagtacggctcctcctcatggacgttcggccaggggaccaaggtcgaaatcaag

SEQ ID NO: 62 - DNA, 723 bp, Artificial Sequence
  source: /note="Description of Artificial Sequence: Synthetic polynucleotide"
gaagtgcaattggtggagactggaggaggagtggtgcaacctggaggaagcctgagactgtcatgcgcggtgtcgggcttcgccctctccaaccacggaatgtcctgggtccgccgggcccctgggaaaggacttgaatgggtgtccggcatcgtgtactcgggttccacctactacgcggcctcagtgaagggccggtttactattagccgcgacaactccagaaacacactgtacctccaaatgaactcgctgcggccggaagataccgctatctactactgctccgcccatgggggagagtcggacgtctggggacagggcaccactgtcactgtgtccagcgcttccggcggtggtggaagcgggggacgggcctcaggaggcggtggcagcgagattgtgctgacccagtcccccgggaccctgagcctgtccccgggagaaagggccaccctctcctgtcgggcatcccagtccgtggggtctactaaccttgcatggtaccagcagaagcccggccaggcccctcgcctgctgatctacgacgcgtccaatagagccaccggcatcccggatcgcttcagcggaggcggatcgggcaccgacttcaccctcaccatttcaaggctggaaccggaggacttcgccgtgtactactgccagcagtatggttcgtccccaccctggacgttcggccaggggactaaggtcgagatcaag

SEQ ID NO: 63 - DNA, 717 bp, Artificial Sequence
  source: /note="Description of Artificial Sequence: Synthetic polynucleotide"
caagtgcaactcgtggaatctggtggaggactcgtgaaacctggaggatcattgagactgtcatgcgcggcctcgggattcacgttctccgattactacatgagctggattcgccaggctccggggaagggactggaatgggtgtcctacatttcctcatccggctccaccatctactacgcggactccgtgaaggggagattcaccattagccgcgataacgccaagaacagcctgtaccttcagatgaactccctgcgggctgaagatactgccgtctactactgcgcaagggagagcggagatgggatggacgtctggggacagggtaccactgtgaccgtgtcgtcggcctccggcggagggggttcgggtggaagggccagcggcggcggaggcagcgacatccagatgacccagtccccctcatcgctgtccgcctccgtgggcgaccgcgtcaccatcacatgccgggcctcacagtcgatctcctcctacctcaattggtatcagcagaagcccggaaaggcccctaagcttctgatctacgcagcgtcctccctgcaatccggggtcccatctcggttctccggctcgggcagcggtaccgacttcactctgaccatctcgagcctgcagccggaggacttcgccacttactactgtcagcaaagctacaccctcgcgtttggccagggcaccaaagtggacatcaag

SEQ ID NO: 64 - DNA, 717 bp, Artificial Sequence
  source: /note="Description of Artificial Sequence: Synthetic polynucleotide"
gaagtgcaattggtggaatcagggggaggacttgtgcagcctggaggatcgctgagactgtcatgtgccgtgtccggctttgccctgtccaaccacgggatgtcctgggtccgccgcgcgcctggaaagggcctcgaatgggtgtcgggtattgtgtacagcggtagcacctactatgccgcatccgtgaaggggagattcaccatcagccgggacaactccaggaacactctgtacctccaaatgaattcgctgaggccagaggacactgccatctactactgctccgcgcatggcggagagtccgacgtctggggacaggggaccaccgtgaccgtgtctagcgcgtccggcggaggcggcagcgggggtcgggcatcagggggcggcggatcggacatccagctcacccagtccccgagctcgctgtccgcctccgtgggagatcgggtcaccatcacgtgccgcgccagccagtcgatttcctcctacctgaactggtaccaacagaagcccggaaaagccccgaagcttctcatctacgccgcctcgagcctgcagtcaggagtgccctcacggttctccggctccggttccggtactgatttcaccctgaccatttcctccctgcaaccggaggacttcgctacttactactgccagcagtcgtactccaccccctacactttcggacaaggcaccaaggtcgaaatcaag

SEQ ID NO: 65 - DNA, 738 bp, Artificial Sequence
  source: /note="Description of Artificial Sequence: Synthetic polynucleotide"
caagtgcaactggtgcaaagcggaggaggattggtcaaacccggaggaagcctgagactgtcatgcgcggcctctggattcaccttctccgattactacatgtcatggatcagacaggccccggggaagggcctcgaatgggtgtcctacatctcgtcctccgggaacaccatctactacgccgacagcgtgaagggccgctttaccatttcccgcgacaacgcaaagaactcgctgtaccttcagatgaattccctgcgggctgaagataccgcggtgtactattgcgcccggtccactatggtccgggaggactactggggacagggcacactcgtgaccgtgtccagcgcgagcgggggtggaggcagcggtggacgcgcctccggcggcggcggttcagacatcgtgctgactcagtcgcccctgtcgctgccggtcaccctgggccaaccggcctcaattagctgcaagtcctcggagagcctggtgcacaactcaggaaagacttacctgaactggttccatcagcggcctggacagtccccacggaggctcatctatgaagtgtccaacagggattcgggggtgcccgaccgcttcactggctccgggtccggcaccgacttcaccttgaaaatctccagagtggaagccgaggacgtgggcgtgtactactgtatgcagggtacccactggcctggaacctttggacaaggaactaagctcgagattaag

SEQ ID NO: 66 - DNA, 717 bp, Artificial Sequence
  source: /note="Description of Artificial Sequence: Synthetic polynucleotide"
caagtgcaactcgtggaatctggtggaggactcgtgcaacccggtggaagccttaggctgtcgtgcgccgtcagcgggtttgctctgagcaaccatggaatgtcctgggtccgccgggcaccgggaaaagggctggaatgggtgtccggcatcgtgtacagcgggtcaacctattacgccgcgtccgtgaagggcagattcactatctcaagagacaacagccggaacaccctgtacttgcaaatgaattccctgcgccccgaggacaccgccatctactactgctccgcccacggaggagagtcggacgtgtggggccagggaacgactgtgactgtgtccagcgcatcaggagggggtggttcgggcggccgggcctcggggggaggaggttccgacattcggctgacccagtccccgtccccactgtcggcctccgtcggcgaccgcgtgaccatcacttgtcaggcgtccgaggacattaacaagttcctgaactggtaccaccagacccctggaaaggcccccaagctgctgatctacgatgcctcgacccttcaaactggagtgcctagccggttctccgggtccggctccggcactgatttcactctgaccatcaactcattgcagccggaagatatcgggacctactattgccagcagtacgaatccctcccgctcacattcggcgggggaaccaaggtcgagattaag

SEQ ID NO: 67 - DNA, 720 bp, Artificial Sequence
  source: /note="Description of Artificial Sequence: Synthetic polynucleotide"
gaagtgcaattggtggaaactggaggaggacttgtgcaacctggaggatcattgcggctctcatgcgctgtctccggcttcgccctgtcaaatcacgggatgtcgtgggtcagacgggccccgggaaagggtctggaatgggtgtcggggattgtgtacagcggctccacctactacgccgcttcggtcaagggccgcttcactatttcacgggacaacagccgcaacaccctctatctgcaaatgaactctctccgcccggaggataccgccatctactactgctccgcacacggcggcgaatccgacgtgtggggacagggaaccactgtcaccgtgtcgtccgcatccggtggcggaggatcgggtggccgggcctccgggggcggcggcagcgagactaccctgacccagtcccctgccactctgtccgtgagcccgggagagagagccacccttagctgccgggccagccagagcgtgggctccaacctggcctggtaccagcagaagccaggacagggtcccaggctgctgatctacggagcctccactcgcgcgaccggcatccccgcgaggttctccgggtcgggttccgggaccgagttcaccctgaccatctcctccctccaaccggaggacttcgcggtgtactactgtcagcagtacaacgattggctgcccgtgacatttggacaggggacgaaggtggaaatcaaa

SEQ ID NO: 68 - DNA, 723 bp, Artificial Sequence
  source: /note="Description of Artificial Sequence: Synthetic polynucleotide"
gaagtgcaattggtggaatctggtggaggacttgtgcaacctggaggatcactgagactgtcatgcgcggtgtccggttttgccctgagcaatcatgggatgtcgtgggtccggcgcgcccccggaaagggtctggaatgggtgtcgggtatcgtctactccgggagcacttactacgccgcgagcgtgaagggccgcttcaccatttcccgcgataactcccgcaacaccctgtacttgcaaatgaactcgctccggcctgaggacactgccatctactactgctccgcacacggaggagaatccgacgtgtggggccagggaactaccgtgaccgtcagcagcgcctccggcggcgggggctcaggcggacgggctagcggcggcggtggctccgagatcgtgctgacccagtcgcctggcactctctcgctgagccccggggaaagggcaaccctgtcctgtcgggccagccagtccattggatcatcctccctcgcctggtatcagcagaaaccgggacaggctccgcggctgcttatgtatggggccagctcaagagcctccggcattcccgaccggttctccgggtccggttccggcaccgatttcaccctgactatctcgaggctggagccagaggacttcgccgtgtactactgccagcagtacgcggggtccccgccgttcacgttcggacagggaaccaaggtcgagatcaag

SEQ ID NO: 69 - protein, 120 aa, Artificial Sequence
  source: /note="Description of Artificial Sequence: Synthetic polypeptide"
QVQLVESGGGLVQPGRSLRLSCAASGFTFSNYAMSWVRQAPGKGLGWVSGISRSGENTYYADSVKGRFTISRDNSKNTLYLQMNSLRDEDTAVYYCARSPAHYYGGMDVWGQGTTVTVSS

SEQ ID NO: 70 - protein, 115 aa, Artificial Sequence
  source: /note="Description of Artificial Sequence: Synthetic polypeptide"
QVQLVESGGGLVQPGRSLRLSCAASGFTFDDYAMHWVRQAPGKGLEWVSGISWNSGSIGYADSVKGRFTISRDNAKNSLYLQMNSLRAEDTALYYCSVHSFLAYWGQGTLVTVSS

SEQ ID NO: 71 - protein, 115 aa, Artificial Sequence
  source: /note="Description of Artificial Sequence: Synthetic polypeptide"
EVQLLESGGGLVQPGGSLRLSCAVSGFALSNHGMSWVRRAPGKGLEWVSGIVYSGSTYYAASVKGRFTISRDNSRNTLYLQMNSLRPEDTAIYYCSAHGGESDVWGQGTTVTVSS

SEQ ID NO: 72 - protein, 120 aa, Artificial Sequence
  source: /note="Description of Artificial Sequence: Synthetic polypeptide"
QVQLVQSGAEVRKTGASVKVSCKASGYIFDNFGINWVRQAPGQGLEWMGWINPKNNNTNYAQKFQGRVTITADESTNTAYMEVSSLRSEDTAVYYCARGPYYYQSYMDVWGQGTMVTVSS

SEQ ID NO: 73 - protein, 123 aa, Artificial Sequence
  source: /note="Description of Artificial Sequence: Synthetic polypeptide"
QVQLQESGGGLVQPGGSLRLSCAASGFTFSSDAMTWVRQAPGKGLEWVSVISGSGGTTYYADSVKGRFTISRDNSKNTLYLQMNSLRAEDTAVYYCAKLDSSGYYYARGPRYWGQGTLVTVSS

SEQ ID NO: 74 - protein, 118 aa, Artificial Sequence
  source: /note="Description of Artificial Sequence: Synthetic polypeptide"
QVQLVQSGAEVKKPGASVKVSCKASGYTFSNYGITWVRQAPGQGLEWMGWISAYNGNTNYAQKFQGRVTMTRNTSISTAYMELSSLRSEDTAVYYCARGPYYYYMDVWGKGTMVTVSS

SEQ ID NO: 75 - protein, 115 aa, Artificial Sequence
  source: /note="Description of Artificial Sequence: Synthetic polypeptide"
EVQLLETGGGLVQPGGSLRLSCAVSGFALSNHGMSWVRRAPGKGLEWVSGIVYSGSTYYAASVKGRFTISRDNSRNTLYLQMNSLRPEDTAIYYCSAHGGESDVWGQGTTVTVSS

SEQ ID NO: 76 - protein, 115 aa, Artificial Sequence
  source: /note="Description of Artificial Sequence: Synthetic polypeptide"
EVQLVETGGGLVQPGGSLRLSCAVSGFALSNHGMSWVRRAPGKGLEWVSGIVYSGSTYYAASVKGRFTISRDNSRNTLYLQMNSLRPEDTAIYYCSAHGGESDVWGQGTTVTVSS

SEQ ID NO: 77 - protein, 115 aa, Artificial Sequence
  source: /note="Description of Artificial Sequence: Synthetic polypeptide"
EVQLVETGGGVVQPGGSLRLSCAVSGFALSNHGMSWVRRAPGKGLEWVSGIVYSGSTYYAASVKGRFTISRDNSRNTLYLQMNSLRPEDTAIYYCSAHGGESDVWGQGTTVTVSS

SEQ ID NO: 78 - protein, 117 aa, Artificial Sequence
  source: /note="Description of Artificial Sequence: Synthetic polypeptide"
QVQLVESGGGLVKPGGSLRLSCAASGFTFSDYYMSWIRQAPGKGLEWVSYISSSGSTIYYADSVKGRFTISRDNAKNSLYLQMNSLRAEDTAVYYCARESGDGMDVWGQGTTVTVSS

SEQ ID NO: 79 - protein, 115 aa, Artificial Sequence
  source: /note="Description of Artificial Sequence: Synthetic polypeptide"
EVQLVESGGGLVQPGGSLRLSCAVSGFALSNHGMSWVRRAPGKGLEWVSGIVYSGSTYYAASVKGRFTISRDNSRNTLYLQMNSLRPEDTAIYYCSAHGGESDVWGQGTTVTVSS

SEQ ID NO: 80 - protein, 117 aa, Artificial Sequence
  source: /note="Description of Artificial Sequence: Synthetic polypeptide"
QVQLVQSGGGLVKPGGSLRLSCAASGFTFSDYYMSWIRQAPGKGLEWVSYISSSGNTIYYADSVKGRFTISRDNAKNSLYLQMNSLRAEDTAVYYCARSTMVREDYWGQGTLVTVSS

SEQ ID NO: 81 - protein, 115 aa, Artificial Sequence
  source: /note="Description of Artificial Sequence: Synthetic polypeptide"
QVQLVESGGGLVQPGGSLRLSCAVSGFALSNHGMSWVRRAPGKGLEWVSGIVYSGSTYYAASVKGRFTISRDNSRNTLYLQMNSLRPEDTAIYYCSAHGGESDVWGQGTTVTVSS

SEQ ID NO: 82 - protein, 115 aa, Artificial Sequence; identical to SEQ ID NO: 76
  source: /note="Description of Artificial Sequence: Synthetic polypeptide"

SEQ ID NO: 83 - protein, 115 aa, Artificial Sequence; identical to SEQ ID NO: 79
  source: /note="Description of Artificial Sequence: Synthetic polypeptide"

SEQ ID NO: 84 - protein, 109 aa, Artificial Sequence
  source: /note="Description of Artificial Sequence: Synthetic polypeptide"
DIVLTQSPGTLSLSPGERATLSCRASQSISSSFLAWYQQKPGQAPRLLIYGASRRATGIPDRFSGSGSGTDFTLTISRLEPEDSAVYYCQQYHSSPSWTFGQGTKLEIK

SEQ ID NO: 85 - protein, 112 aa, Artificial Sequence
  source: /note="Description of Artificial Sequence: Synthetic polypeptide"
DIVMTQTPLSLPVTPGEPASISCRSSQSLLHSNGYNYLDWYLQKPGQSPQLLIYLGSNRASGVPDRFSGSGSGTDFTLKISRVEAEDVGVYYCMQALQTPYTFGQGTKVEIK

SEQ ID NO: 86 - protein, 111 aa, Artificial Sequence
  source: /note="Description of Artificial Sequence: Synthetic polypeptide"
DIVMTQTPLSLSVTPGQPASISCKSSQSLLRNDGKTPLYWYLQKAGQPPQLLIYEVSNRFSGVPDRFSGSGSGTDFTLKISRVEAEDVGAYYCMQNIQFPSFGGGTKLEIK

SEQ ID NO: 87 - protein, 112 aa, Artificial Sequence
  source: /note="Description of Artificial Sequence: Synthetic polypeptide"
DIVMTQTPLSLPVTPGEPASISCRSSQSLLHSNGYNYLNWYLQKPGQSPQLLIYLGSKRASGVPDRFSGSGSGTDFTLHITRVGAEDVGVYYCMQALQTPYTFGQGTKLEIK

SEQ ID NO: 88 - protein, 106 aa, Artificial Sequence
  source: /note="Description of Artificial Sequence: Synthetic polypeptide"
DIQLTQSPSSLSASVGDRVTITCRASQSISSYLNWYQQKPGKAPKLLIYGASTLASGVPARFSGSGSGTHFTLTINSLQSEDSATYYCQQSYKRASFGQGTKVEIK

SEQ ID NO: 89 - protein, 112 aa, Artificial Sequence
  source: /note="Description of Artificial Sequence: Synthetic polypeptide"
EIVMTQSPLSLPVTPGEPASISCRSSQSLLYSNGYNYVDWYLQKPGQSPQLLIYLGSNRASGVPDRFSGSGSGTDFKLQISRVEAEDVGIYYCMQGRQFPYSFGQGTKVEIK

SEQ ID NO: 90 - protein, 106 aa, Artificial Sequence
  source: /note="Description of Artificial Sequence: Synthetic polypeptide"
EIVLTQSPATLSVSPGESATLSCRASQSVSSNLAWYQQKPGQAPRLLIYGASTRASGIPDRFSGSGSGTDFTLTISSLQAEDVAVYYCQQYGSSLTFGGGTKVEIK

SEQ ID NO: 91 - protein, 107 aa, Artificial Sequence
  source: /note="Description of Artificial Sequence: Synthetic polypeptide"
EIVMTQSPATLSVSPGERATLSCRASQSVSSKLAWYQQKPGQAPRLLMYGASIRATGIPDRFSGSGSGTEFTLTISSLEPEDFAVYYCQQYGSSSWTFGQGTKVEIK

SEQ ID NO: 92 - protein, 109 aa, Artificial Sequence
  source: /note="Description of Artificial Sequence: Synthetic polypeptide"
EIVLTQSPGTLSLSPGERATLSCRASQSVGSTNLAWYQQKPGQAPRLLIYDASNRATGIPDRFSGGGSGTDFTLTISRLEPEDFAVYYCQQYGSSPPWTFGQGTKVEIK

SEQ ID NO: 93 - protein, 105 aa, Artificial Sequence
  source: /note="Description of Artificial Sequence: Synthetic polypeptide"
DIQMTQSPSSLSASVGDRVTITCRASQSISSYLNWYQQKPGKAPKLLIYAASSLQSGVPSRFSGSGSGTDFTLTISSLQPEDFATYYCQQSYTLAFGQGTKVDIK

SEQ ID NO: 94 - protein, 107 aa, Artificial Sequence
  source: /note="Description of Artificial Sequence: Synthetic polypeptide"
DIQLTQSPSSLSASVGDRVTITCRASQSISSYLNWYQQKPGKAPKLLIYAASSLQSGVPSRFSGSGSGTDFTLTISSLQPEDFATYYCQQSYSTPYTFGQGTKVEIK

SEQ ID NO: 95 - protein, 112 aa, Artificial Sequence
  source: /note="Description of Artificial Sequence: Synthetic polypeptide"
DIVLTQSPLSLPVTLGQPASISCKSSESLVHNSGKTYLNWFHQRPGQSPRRLIYEVSNRDSGVPDRFTGSGSGTDFTLKISRVEAEDVGVYYCMQGTHWPGTFGQGTKLEIK

SEQ ID NO: 96 - protein, 107 aa, Artificial Sequence
  source: /note="Description of Artificial Sequence: Synthetic polypeptide"
DIRLTQSPSPLSASVGDRVTITCQASEDINKFLNWYHQTPGKAPKLLIYDASTLQTGVPSRFSGSGSGTDFTLTINSLQPEDIGTYYCQQYESLPLTFGGGTKVEIK

SEQ ID NO: 97 - protein, 108 aa, Artificial Sequence
  source: /note="Description of Artificial Sequence: Synthetic polypeptide"
ETTLTQSPATLSVSPGERATLSCRASQSVGSNLAWYQQKPGQGPRLLIYGASTRATGIPARFSGSGSGTEFTLTISSLQPEDFAVYYCQQYNDWLPVTFGQGTKVEIK

SEQ ID NO: 98 - protein, 109 aa, Artificial Sequence
  source: /note="Description of Artificial Sequence: Synthetic polypeptide"
EIVLTQSPGTLSLSPGERATLSCRASQSIGSSSLAWYQQKPGQAPRLLMYGASSRASGIPDRFSGSGSGTDFTLTISRLEPEDFAVYYCQQYAGSPPFTFGQGTKVEIK

SEQ ID NO: 99 - protein, 490 aa, Artificial Sequence
  source: /note="Description of Artificial Sequence: Synthetic polypeptide"
MALPVTALLLPLALLLHAARPQVQLVESGGGLVQPGRSLRLSCAASGFTFSNYAMSWVRQAPGKGLGWVSGISRSGENTYYADSVKGRFTISRDNSKNTLYLQMNSLRDEDTAVYYCARSPAHYYGGMDVWGQGTTVTVSSASGGGGSGGRASGGGGSDIVLTQSPGTLSLSPGERATLSCRASQSISSSFLAWYQQKPGQAPRLLIYGASRRATGIPDRFSGSGSGTDFTLTISRLEPEDSAVYYCQQYHSSPSWTFGQGTKLEIKTTTPAPRPPTPAPTIASQPLSLRPEACRPAAGGAVHTRGLDFACDIYIWAPLAGTCGVLLLSLVITLYCKRGRKKLLYIFKQPFMRPVQTTQEEDGCSCRFPEEEEGGCELRVKFSRSADAPAYKQGQNQLYNELNLGRREEYDVLDKRRGRDPEMGGKPRRKNPQEGLYNELQKDKMAEAYSEIGMKGERRRGKGHDGLYQGLSTATKDTYDALHMQALPPR

SEQ ID NO: 100 - protein, 488 aa, Artificial Sequence
  source: /note="Description of Artificial Sequence: Synthetic polypeptide"
MALPVTALLLPLALLLHAARPQVQLVESGGGLVQPGRSLRLSCAASGFTFDDYAMHWVRQAPGKGLEWVSGISWNSGSIGYADSVKGRFTISRDNAKNSLYLQMNSLRAEDTALYYCSVHSFLAYWGQGTLVTVSSASGGGGSGGRASGGGGSDIVMTQTPLSLPVTPGEPASISCRSSQSLLHSNGYNYLDWYLQKPGQSPQLLIYLGSNRASGVPDRFSGSGSGTDFTLKISRVEAEDVGVYYCMQALQTPYTFGQGTKVEIKTTTPAPRPPTPAPTIASQPLSLRPEACRPAAGGAVHTRGLDFACDIYIWAPLAGTCGVLLLSLVITLYCKRGRKKLLYIFKQPFMRPVQTTQEEDGCSCRFPEEEEGGCELRVKFSRSADAPAYKQGQNQLYNELNLGRREEYDVLDKRRGRDPEMGGKPRRKNPQEGLYNELQKDKMAEAYSEIGMKGERRRGKGHDGLYQGLSTATKDTYDALHMQALPPR

SEQ ID NO: 101 - protein, 487 aa, Artificial Sequence
  source: /note="Description of Artificial Sequence: Synthetic polypeptide"
MALPVTALLLPLALLLHAARPEVQLLESGGGLVQPGGSLRLSCAVSGFALSNHGMSWVRRAPGKGLEWVSGIVYSGSTYYAASVKGRFTISRDNSRNTLYLQMNSLRPEDTAIYYCSAHGGESDVWGQGTTVTVSSASGGGGSGGRASGGGGSDIVMTQTPLSLSVTPGQPASISCKSSQSLLRNDGKTPLYWYLQKAGQPPQLLIYEVSNRFSGVPDRFSGSGSGTDFTLKISRVEAEDVGAYYCMQNIQFPSFGGGTKLEIKTTTPAPRPPTPAPTIASQPLSLRPEACRPAAGGAVHTRGLDFACDIYIWAPLAGTCGVLLLSLVITLYCKRGRKKLLYIFKQPFMRPVQTTQEEDGCSCRFPEEEEGGCELRVKFSRSADAPAYKQGQNQLYNELNLGRREEYDVLDKRRGRDPEMGGKPRRKNPQEGLYNELQKDKMAEAYSEIGMKGERRRGKGHDGLYQGLSTATKDTYDALHMQALPPR

SEQ ID NO: 102 - protein, 493 aa, Artificial Sequence
  source: /note="Description of Artificial Sequence: Synthetic polypeptide"
MALPVTALLLPLALLLHAARPQVQLVQSGAEVRKTGASVKVSCKASGYIFDNFGINWVRQAPGQGLEWMGWINPKNNNTNYAQKFQGRVTITADESTNTAYMEVSSLRSEDTAVYYCARGPYYYQSYMDVWGQGTMVTVSSASGGGGSGGRASGGGGSDIVMTQTPLSLPVTPGEPASISCRSSQSLLHSNGYNYLNWYLQKPGQSPQLLIYLGSKRASGVPDRFSGSGSGTDFTLHITRVGAEDVGVYYCMQALQTPYTFGQGTKLEIKTTTPAPRPPTPAPTIASQPLSLRPEACRPAAGGAVHTRGLDFACDIYIWAPLAGTCGVLLLSLVITLYCKRGRKKLLYIFKQPFMRPVQTTQEEDGCSCRFPEEEEGGCELRVKFSRSADAPAYKQGQNQLYNELNLGRREEYDVLDKRRGRDPEMGGKPRRKNPQEGLYNELQKDKMAEAYSEIGMKGERRRGKGHDGLYQGLSTATKDTYDALHMQALPPR

SEQ ID NO: 103 - protein, 490 aa, Artificial Sequence
  source: /note="Description of Artificial Sequence: Synthetic polypeptide"
MALPVTALLLPLALLLHAARPQVQLQESGGGLVQPGGSLRLSCAASGFTFSSDAMTWVRQAPGKGLEWVSVISGSGGTTYYADSVKGRFTISRDNSKNTLYLQMNSLRAEDTAVYYCAKLDSSGYYYARGPRYWGQGTLVTVSSASGGGGSGGRASGGGGSDIQLTQSPSSLSASVGDRVTITCRASQSISSYLNWYQQKPGKAPKLLIYGASTLASGVPARFSGSGSGTHFTLTINSLQSEDSATYYCQQSYKRASFGQGTKVEIKTTTPAPRPPTPAPTIASQPLSLRPEACRPAAGGAVHTRGLDFACDIYIWAPLAGTCGVLLLSLVITLYCKRGRKKLLYIFKQPFMRPVQTTQEEDGCSCRFPEEEEGGCELRVKFSRSADAPAYKQGQNQLYNELNLGRREEYDVLDKRRGRDPEMGGKPRRKNPQEGLYNELQKDKMAEAYSEIGMKGERRRGKGHDGLYQGLSTATKDTYDALHMQALPPR

SEQ ID NO: 104 - protein, 491 aa, Artificial Sequence
  source: /note="Description of Artificial Sequence: Synthetic polypeptide"
MALPVTALLLPLALLLHAARPQVQLVQSGAEVKKPGASVKVSCKASGYTFSNYGITWVRQAPGQGLEWMGWISAYNGNTNYAQKFQGRVTMTRNTSISTAYMELSSLRSEDTAVYYCARGPYYYYMDVWGKGTMVTVSSASGGGGSGGRASGGGGSEIVMTQSPLSLPVTPGEPASISCRSSQSLLYSNGYNYVDWYLQKPGQSPQLLIYLGSNRASGVPDRFSGSGSGTDFKLQISRVEAEDVGIYYCMQGRQFPYSFGQGTKVEIKTTTPAPRPPTPAPTIASQPLSLRPEACRPAAGGAVHTRGLDFACDIYIWAPLAGTCGVLLLSLVITLYCKRGRKKLLYIFKQPFMRPVQTTQEEDGCSCRFPEEEEGGCELRVKFSRSADAPAYKQGQNQLYNELNLGRREEYDVLDKRRGRDPEMGGKPRRKNPQEGLYNELQKDKMAEAYSEIGMKGERRRGKGHDGLYQGLSTATKDTYDALHMQALPPR

SEQ ID NO: 105 - protein, 482 aa, Artificial Sequence
  source: /note="Description of Artificial Sequence: Synthetic polypeptide"
MALPVTALLLPLALLLHAARPEVQLLETGGGLVQPGGSLRLSCAVSGFALSNHGMSWVRRAPGKGLEWVSGIVYSGSTYYAASVKGRFTISRDNSRNTLYLQMNSLRPEDTAIYYCSAHGGESDVWGQGTTVTVSSASGGGGSGGRASGGGGSEIVLTQSPATLSVSPGESATLSCRASQSVSSNLAWYQQKPGQAPRLLIYGASTRASGIPDRFSGSGSGTDFTLTISSLQAEDVAVYYCQQYGSSLTFGGGTKVEIKTTTPAPRPPTPAPTIASQPLSLRPEACRPAAGGAVHTRGLDFACDIYIWAPLAGTCGVLLLSLVITLYCKRGRKKLLYIFKQPFMRPVQTTQEEDGCSCRFPEEEEGGCELRVKFSRSADAPAYKQGQNQLYNELNLGRREEYDVLDKRRGRDPEMGGKPRRKNPQEGLYNELQKDKMAEAYSEIGMKGERRRGKGHDGLYQGLSTATKDTYDALHMQALPPR

SEQ ID NO: 106 - protein, 483 aa, Artificial Sequence
  source: /note="Description of Artificial Sequence: Synthetic polypeptide"
MALPVTALLLPLALLLHAARPEVQLVETGGGLVQPGGSLRLSCAVSGFALSNHGMSWVRRAPGKGLEWVSGIVYSGSTYYAASVKGRFTISRDNSRNTLYLQMNSLRPEDTAIYYCSAHGGESDVWGQGTTVTVSSASGGGGSGGRASGGGGSEIVMTQSPATLSVSPGERATLSCRASQSVSSKLAWYQQKPGQAPRLLMYGASIRATGIPDRFSGSGSGTEFTLTISSLEPEDFAVYYCQQYGSSSWTFGQGTKVEIKTTTPAPRPPTPAPTIASQPLSLRPEACRPAAGGAVHTRGLDFACDIYIWAPLAGTCGVLLLSLVITLYCKRGRKKLLYIFKQPFMRPVQTTQEEDGCSCRFPEEEEGGCELRVKFSRSADAPAYKQGQNQLYNELNLGRREEYDVLDKRRGRDPEMGGKPRRKNPQEGLYNELQKDKMAEAYSEIGMKGERRRGKGHDGLYQGLSTATKDTYDALHMQALPPR

SEQ ID NO: 107 - protein, 485 aa, Artificial Sequence
  source: /note="Description of Artificial Sequence: Synthetic polypeptide"
MALPVTALLLPLALLLHAARPEVQLVETGGGVVQPGGSLRLSCAVSGFALSNHGMSWVRRAPGKGLEWVSGIVYSGSTYYAASVKGRFTISRDNSRNTLYLQMNSLRPEDTAIYYCSAHGGESDVWGQGTTVTVSSASGGGGSGGRASGGGGSEIVLTQSPGTLSLSPGERATLSCRASQSVGSTNLAWYQQKPGQAPRLLIYDASNRATGIPDRFSGGGSGTDFTLTISRLEPEDFAVYYCQQYGSSPPWTFGQGTKVEIKTTTPAPRPPTPAPTIASQPLSLRPEACRPAAGGAVHTRGLDFACDIYIWAPLAGTCGVLLLSLVITLYCKRGRKKLLYIFKQPFMRPVQTTQEEDGCSCRFPEEEEGGCELRVKFSRSADAPAYKQGQNQLYNELNLGRREEYDVLDKRRGRDPEMGGKPRRKNPQEGLYNELQKDKMAEAYSEIGMKGERRRGKGHDGLYQGLSTATKDTYDALHMQALPPR

SEQ ID NO: 108 - protein, 483 aa, Artificial Sequence
  source: /note="Description of Artificial Sequence: Synthetic polypeptide"
MALPVTALLLPLALLLHAARPQVQLVESGGGLVKPGGSLRLSCAASGFTFSDYYMSWIRQAPGKGLEWVSYISSSGSTIYYADSVKGRFTISRDNAKNSLYLQMNSLRAEDTAVYYCARESGDGMDVWGQGTTVTVSSASGGGGSGGRASGGGGSDIQMTQSPSSLSASVGDRVTITCRASQSISSYLNWYQQKPGKAPKLLIYAASSLQSGVPSRFSGSGSGTDFTLTISSLQPEDFATYYCQQSYTLAFGQGTKVDIKTTTPAPRPPTPAPTIASQPLSLRPEACRPAAGGAVHTRGLDFACDIYIWAPLAGTCGVLLLSLVITLYCKRGRKKLLYIFKQPFMRPVQTTQEEDGCSCRFPEEEEGGCELRVKFSRSADAPAYKQGQNQLYNELNLGRREEYDVLDKRRGRDPEMGGKPRRKNPQEGLYNELQKDKMAEAYSEIGMKGERRRGKGHDGLYQGLSTATKDTYDALHMQALPPR

SEQ ID NO: 109 - protein, 483 aa, Artificial Sequence
  source: /note="Description of Artificial Sequence: Synthetic polypeptide"
MALPVTALLLPLALLLHAARPEVQLVESGGGLVQPGGSLRLSCAVSGFALSNHGMSWVRRAPGKGLEWVSGIVYSGSTYYAASVKGRFTISRDNSRNTLYLQMNSLRPEDTAIYYCSAHGGESDVWGQGTTVTVSSASGGGGSGGRASGGGGSDIQLTQSPSSLSASVGDRVTITCRASQSISSYLNWYQQKPGKAPKLLIYAASSLQSGVPSRFSGSGSGTDFTLTISSLQPEDFATYYCQQSYSTPYTFGQGTKVEIKTTTPAPRPPTPAPTIASQPLSLRPEACRPAAGGAVHTRGLDFACDIYIWAPLAGTCGVLLLSLVITLYCKRGRKKLLYIFKQPFMRPVQTTQEEDGCSCRFPEEEEGGCELRVKFSRSADAPAYKQGQNQLYNELNLGRREEYDVLDKRRGRDPEMGGKPRRKNPQEGLYNELQKDKMAEAYSEIGMKGERRRGKGHDGLYQGLSTATKDTYDALHMQALPPR

SEQ ID NO: 110 - protein, 490 aa, Artificial Sequence
  source: /note="Description of Artificial Sequence: Synthetic polypeptide"
MALPVTALLLPLALLLHAARPQVQLVQSGGGLVKPGGSLRLSCAASGFTFSDYYMSWIRQAPGKGLEWVSYISSSGNTIYYADSVKGRFTISRDNAKNSLYLQMNSLRAEDTAVYYCARSTMVREDYWGQGTLVTVSSASGGGGSGGRASGGGGSDIVLTQSPLSLPVTLGQPASISCKSSESLVHNSGKTYLNWFHQRPGQSPRRLIYEVSNRDSGVPDRFTGSGSGTDFTLKISRVEAEDVGVYYCMQGTHWPGTFGQGTKLEIKTTTPAPRPPTPAPTIASQPLSLRPEACRPAAGGAVHTRGLDFACDIYIWAPLAGTCGVLLLSLVITLYCKRGRKKLLYIFKQPFMRPVQTTQEEDGCSCRFPEEEEGGCELRVKFSRSADAPAYKQGQNQLYNELNLGRREEYDVLDKRRGRDPEMGGKPRRKNPQEGLYNELQKDKMAEAYSEIGMKGERRRGKGHDGLYQGLSTATKDTYDALHMQALPPR

SEQ ID NO: 111 - protein, 483 aa, Artificial Sequence
  source: /note="Description of Artificial Sequence: Synthetic polypeptide"
MALPVTALLLPLALLLHAARPQVQLVESGGGLVQPGGSLRLSCAVSGFALSNHGMSWVRRAPGKGLEWVSGIVYSGSTYYAASVKGRFTISRDNSRNTLYLQMNSLRPEDTAIYYCSAHGGESDVWGQGTTVTVSSASGGGGSGGRASGGGGSDIRLTQSPSPLSASVGDRVTITCQASEDINKFLNWYHQTPGKAPKLLIYDASTLQTGVPSRFSGSGSGTDFTLTINSLQPEDIGTYYCQQYESLPLTFGGGTKVEIKTTTPAPRPPTPAPTIASQPLSLRPEACRPAAGGAVHTRGLDFACDIYIWAPLAGTCGVLLLSLVITLYCKRGRKKLLYIFKQPFMRPVQTTQEEDGCSCRFPEEEEGGCELRVKFSRSADAPAYKQGQNQLYNELNLGRREEYDVLDKRRGRDPEMGGKPRRKNPQEGLYNELQKDKMAEAYSEIGMKGERRRGKGHDGLYQGLSTATKDTYDALHMQALPPR

SEQ ID NO: 112 - protein, 484 aa, Artificial Sequence
  source: /note="Description of Artificial Sequence: Synthetic polypeptide"
MALPVTALLLPLALLLHAARPEVQLVETGGGLVQPGGSLRLSCAVSGFALSNHGMSWVRRAPGKGLEWVSGIVYSGSTYYAASVKGRFTISRDNSRNTLYLQMNSLRPEDTAIYYCSAHGGESDVWGQGTTVTVSSASGGGGSGGRASGGGGSETTLTQSPATLSVSPGERATLSCRASQSVGSNLAWYQQKPGQGPRLLIYGASTRATGIPARFSGSGSGTEFTLTISSLQPEDFAVYYCQQYNDWLPVTFGQGTKVEIKTTTPAPRPPTPAPTIASQPLSLRPEACRPAAGGAVHTRGLDFACDIYIWAPLAGTCGVLLLSLVITLYCKRGRKKLLYIFKQPFMRPVQTTQEEDGCSCRFPEEEEGGCELRVKFSRSADAPAYKQGQNQLYNELNLGRREEYDVLDKRRGRDPEMGGKPRRKNPQEGLYNELQKDKMAEAYSEIGMKGERRRGKGHDGLYQGLSTATKDTYDALHMQALPPR

SEQ ID NO: 113 - protein, 485 aa, Artificial Sequence
  source: /note="Description of Artificial Sequence: Synthetic polypeptide"
MALPVTALLLPLALLLHAARPEVQLVESGGGLVQPGGSLRLSCAVSGFALSNHGMSWVRRAPGKGLEWVSGIVYSGSTYYAASVKGRFTISRDNSRNTLYLQMNSLRPEDTAIYYCSAHGGESDVWGQGTTVTVSSASGGGGSGGRASGGGGSEIVLTQSPGTLSLSPGERATLSCRASQSIGSSSLAWYQQKPGQAPRLLMYGASSRASGIPDRFSGSGSGTDFTLTISRLEPEDFAVYYCQQYAGSPPFTFGQGTKVEIKTTTPAPRPPTPAPTIASQPLSLRPEACRPAAGGAVHTRGLDFACDIYIWAPLAGTCGVLLLSLVITLYCKRGRKKLLYIFKQPFMRPVQTTQEEDGCSCRFPEEEEGGCELRVKFSRSADAPAYKQGQNQLYNELNLGRREEYDVLDKRRGRDPEMGGKPRRKNPQEGLYNELQKDKMAEAYSEIGMKGERRRGKGHDGLYQGLSTATKDTYDALHMQALPPR

SEQ ID NO: 114 - DNA, 1470 bp, Artificial Sequence
  source: /note="Description of Artificial Sequence: Synthetic polynucleotide"
atggccctccctgtcaccgccctgctgcttccgctggctcttctgctccacgccgctcggccccaagtgcaactcgtggaatctggtggaggactcgtgcaacccggaagatcgcttagactgtcgtgtgccgccagcgggttcactttctcgaactacgcgatgtcctgggtccgccaggcacccggaaagggactcggttgggtgtccggcatttcccggtccggcgaaaatacctactacgccgactccgtgaagggccgcttcaccatctcaagggacaacagcaaaaacaccctgtacttgcaaatgaactccctgcgggatgaagatacagccgtgtactattgcgcccggtcgcctgcccattactacggcggaatggacgtctggggacagggaaccactgtgactgtcagcagcgcgtcgggtggcggcggctcagggggtcgggcctccggggggggagggtccgacatcgtgctgacccagtccccgggaaccctgagcctgagcccgggagagcgcgcgaccctgtcatgccgggcatcccagagcattagctcctcctttctcgcctggtatcagcagaagcccggacaggccccgaggctgctgatctacggcgctagcagaagggctaccggaatcccagaccggttctccggctccggttccgggaccgatttcacccttactatctcgcgcctggaacctgaggactccgccgtctactactgccagcagtaccactcatccccgtcgtggacgttcggacagggcaccaagctggagattaagaccactaccccagcaccgaggccacccaccccggctcctaccatcgcctcccagcctctgtccctgcgtccggaggcatgtagacccgcagctggtggggccgtgcatacccggggtcttgacttcgcctgcgatatctacatttgggcccctctggctggtacttgcggggtcctgctgctttcactcgtgatcactctttactgtaagcgcggtcggaagaagctgctgtacatctttaagcaacccttcatgaggcctgtgcagactactcaagaggaggacggctgttcatgccggttcccagaggaggaggaaggcggctgcgaactgcgcgtgaaattcagccgcagcgcagatgctccagcctacaagcaggggcagaaccagctctacaacgaactcaatcttggtcggagagaggagtacgacgtgctggacaagcggagaggacgggacccagaaatgggcgggaagccgcgcagaaagaatccccaagagggcctgtacaacgagctccaaaaggataagatggcagaagcctatagcgagattggtatgaaaggggaacgcagaagaggcaaaggccacgacggactgtaccagggactcagcaccgccaccaaggacacctatgacgctcttcacatgcaggccctgccgcctcgg

SEQ ID NO: 115 - DNA, 1464 bp, Artificial Sequence
  source: /note="Description of Artificial Sequence: Synthetic polynucleotide"
atggccctccctgtcaccgccctgctgcttccgctggctcttctgctccacgccgctcggccccaagtgcaactcgtcgaatccggtggaggtctggtccaacctggtagaagcctgagactgtcgtgtgcggccagcggattcacctttgatgactatgctatgcactgggtgcggcaggccccaggaaagggcctggaatgggtgtcgggaattagctggaactccgggtccattggctacgccgactccgtgaagggccgcttcaccatctcccgcgacaacgcaaagaactccctgtacttgcaaatgaactcgctcagggctgaggataccgcgctgtactactgctccgtgcattccttcctggcctactggggacagggaactctggtcaccgtgtcgagcgcctccggcggcgggggctcgggtggacgggcctcgggcggaggggggtccgacatcgtgatgacccagaccccgctgagcttgcccgtgactcccggagagcctgcatccatctcctgccggtcatcccagtcccttctccactccaacggatacaactacctcgactggtacctccagaagccgggacagagccctcagcttctgatctacctggggtcaaatagagcctcaggagtgccggatcggttcagcggatctggttcgggaactgatttcactctgaagatttcccgcgtggaagccgaggacgtgggcgtctactactgtatgcaggcgctgcagaccccctataccttcggccaagggacgaaagtggagatcaagaccactaccccagcaccgaggccacccaccccggctcctaccatcgcctcccagcctctgtccctgcgtccggaggcatgtagacccgcagctggtggggccgtgcatacccggggtcttgacttcgcctgcgatatctacatttgggcccctctggctggtacttgcggggtcctgctgctttcactcgtgatcactctttactgtaagcgcggtcggaagaagctgctgtacatctttaagcaacccttcatgaggcctgtgcagactactcaagaggaggacggctgttcatgccggttcccagaggaggaggaaggcggctgcgaactgcgcgtgaaattcagccgcagcgcagatgctccagcctacaagcaggggcagaaccagctctacaacgaactcaatcttggtcggagagaggagtacgacgtgctggacaagcggagaggacgggacccagaaatgggcgggaagccgcgcagaaagaatccccaagagggcctgtacaacgagctccaaaaggataagatggcagaagcctatagcgagattggtatgaaaggggaacgcagaagaggcaaaggccacgacggactgtaccagggactcagcaccgccaccaaggacacctatgacgctcttcacatgcaggccctgccgcctcgg

SEQ ID NO: 116 - DNA, 1461 bp, Artificial Sequence
  source: /note="Description of Artificial Sequence: Synthetic polynucleotide"
atggccctccctgtcaccgccctgctgcttccgctggctcttctgctccacgccgctcggcccgaagtgcaattgttggaatctggaggaggacttgtgcagcctggaggatcactgagactttcgtgtgcggtgtcaggcttcgccctgagcaaccacggcatgagctgggtgcggagagccccggggaagggtctggaatgggtgtccgggatcgtctactccggttcaacttactacgccgcaagcgtgaagggtcgcttcaccatttcccgcgataactcccggaacaccctgtacctccaaatgaactccctgcggcccgaggacaccgccatctactactgttccgcgcatggaggagagtccgatgtctggggacagggcactaccgtgaccgtgtcgagcgcctcggggggaggaggctccggcggtcgcgcctccggggggggtggcagcgacattgtgatgacgcagactccactctcgctgtccgtgaccccgggacagcccgcgtccatctcgtgcaagagctcccagagcctgctgaggaacgacggaaagactcctctgtattggtacctccagaaggctggacagcccccgcaactgctcatctacgaagtgtcaaatcgcttctccggggtgccggatcggttttccggctcgggatcgggcaccgacttcaccctgaaaatctccagggtcgaggccgaggacgtgggagcctactactgcatgcaaaacatccagttcccttccttcggcggcggcacaaagctggagattaagaccactaccccagcaccgaggccacccaccccggctcctaccatcgcctcccagcctctgtccctgcgtccggaggcatgtagacccgcagctggtggggccgtgcatacccggggtcttgacttcgcctgcgatatctacatttgggcccctctggctggtacttgcggggtcctgctgctttcactcgtgatcactctttactgtaagcgcggtcggaagaagctgctgtacatctttaagcaacccttcatgaggcctgtgcagactactcaagaggaggacggctgttcatgccggttcccagaggaggaggaaggcggctgcgaactgcgcgtgaaattcagccgcagcgcagatgctccagcctacaagcaggggcagaaccagctctacaacgaactcaatcttggtcggagagaggagtacgacgtgctggacaagcggagaggacgggacccagaaatgggcgggaagccgcgcagaaagaatccccaagagggcctgtacaacgagctccaaaaggataagatggcagaagcctatagcgagattggtatgaaaggggaacgcagaagaggcaaaggccacgacggactgtaccagggactcagcaccgccaccaaggacacctatgacgctcttcacatgcaggccctgccgcctcgg

SEQ ID NO: 117 - DNA, 1479 bp, Artificial Sequence
  source: /note="Description of Artificial Sequence: Synthetic polynucleotide"
atggccctccctgtcaccgccctgctgcttccgctggctcttctgctccacgccgctcggccccaagtccaactcgtccagtccggcgcagaagtcagaaaaaccggtgctagcgtgaaagtgtcctgcaaggcctccggctacattttcgataacttcggaatcaactgggtcagacaggccccgggccaggggctggaatggatgggatggatcaaccccaagaacaacaacaccaactacgcacagaagttccagggccgcgtgactatcaccgccgatgaatcgaccaataccgcctacatggaggtgtcctccctgcggtcggaggacactgccgtgtattactgcgcgaggggcccatactactaccaaagctacatggacgtctggggacagggaaccatggtgaccgtgtcatccgcctccggtggtggaggctccggggggcgggcttcaggaggcggaggaagcgatattgtgatgacccagactccgcttagcctgcccgtgactcctggagaaccggcctccatttcctgccggtcctcgcaatcactcctgcattccaacggttacaactacctgaattggtacctccagaagcctggccagtcgccccagttgctgatctatctgggctcgaagcgcgcctccggggtgcctgaccggtttagcggatctgggagcggcacggacttcactctccacatcacccgcgtgggagcggaggacgtgggagtgtactactgtatgcaggcgctgcagactccgtacacattcggacagggcaccaagctggagatcaagaccactaccccagcaccgaggccacccaccccggctcctaccatcgcctcccagcctctgtccctgcgtccggaggcatgtagacccgcagctggtggggccgtgcatacccggggtcttgacttcgcctgcgatatctacatttgggcccctctggctggtacttgcggggtcctgctgctttcactcgtgatcactctttactgtaagcgcggtcggaagaagctgctgtacatctttaagcaacccttcatgaggcctgtgcagactactcaagaggaggacggctgttcatgccggttcccagaggaggaggaaggcggctgcgaactgcgcgtgaaattcagccgcagcgcagatgctccagcctacaagcaggggcagaaccagctctacaacgaactcaatcttggtcggagagaggagtacgacgtgctggacaagcggagaggacgggacccagaaatgggcgggaagccgcgcagaaagaatccccaagagggcctgtacaacgagctccaaaaggataagatggcagaagcctatagcgagattggtatgaaaggggaacgcagaagaggcaaaggccacgacggactgtaccagggactcagcaccgccaccaaggacacctatgacgctcttcacatgcaggccctgccgcctcgg

SEQ ID NO: 118 - DNA, 1470 bp, Artificial Sequence
  source: /note="Description of Artificial Sequence: Synthetic polynucleotide"
atggccctccctgtcaccgccctgctgcttccgctggctcttctgctccacgccgctcggccccaagtgcaacttcaagaatcaggcggaggactcgtgcagcccggaggatcattgcggctctcgtgcgccgcctcgggcttcaccttctcgagcgacgccatgacctgggtccgccaggccccggggaaggggctggaatgggtgtctgtgatttccggctccgggggaactacgtactacgccgattccgtgaaaggtcgcttcactatctcccgggacaacagcaagaacaccctttatctgcaaatgaattccctccgcgccgaggacaccgccgtgtactactgcgccaagctggactcctcgggctactactatgcccggggtccgagatactggggacagggaaccctcgtgaccgtgtcctccgcgtccggcggaggagggtcgggagggcgggcctccggcggcggcggttcggacatccagctgacccagtccccatcctcactgagcgcaagcgtgggcgacagagtcaccattacatgcagggcgtcccagagcatcagctcctacctgaactggtaccaacagaagcctggaaaggctcctaagctgttgatctacggggcttcgaccctggcatccggggtgcccgcgaggtttagcggaagcggtagcggcactcacttcactctgaccattaacagcctccagtccgaggattcagccacttactactgtcagcagtcctacaagcgggccagcttcggacagggcactaaggtcgagatcaagaccactaccccagcaccgaggccacccaccccggctcctaccatcgcctcccagcctctgtccctgcgtccggaggcatgtagacccgcagctggtggggccgtgcatacccggggtcttgacttcgcctgcgatatctacatttgggcccctctggctggtacttgcggggtcctgctgctttcactcgtgatcactctttactgtaagcgcggtcggaagaagctgctgtacatctttaagcaacccttcatgaggcctgtgcagactactcaagaggaggacggctgttcatgccggttcccagaggaggaggaaggcggctgcgaactgcgcgtgaaattcagccgcagcgcagatgctccagcctacaagcaggggcagaaccagctctacaacgaactcaatcttggtcggagagaggagtacgacgtgctggacaagcggagaggacgggacccagaaatgggcgggaagccgcgcagaaagaatccccaagagggcctgtacaacgagctccaaaaggataagatggcagaagcctatagcgagattggtatgaaaggggaacgcagaagaggcaaaggccacgacggactgtaccagggactcagcaccgccaccaaggacacctatgacgctcttcacatgcaggccctgccgcctcgg

SEQ ID NO: 119 - DNA, 1473 bp, Artificial Sequence
  source: /note="Description of Artificial Sequence: Synthetic polynucleotide"
atggccctccctgtcaccgccctgctgcttccgctggctcttctgctccacgccgctcggccccaagtccaactggtccagagcggtgcagaagtgaagaagcccggagcgagcgtgaaagtgtcctgcaaggcttccgggtacaccttctccaactacggcatcacttgggtgcgccaggccccgggacagggcctggaatggatggggtggatttccgcgtacaacggcaatacgaactacgctcagaagttccagggtagagtgaccatgactaggaacacctccatttccaccgcctacatggaactgtcctccctgcggagcgaggacaccgccgtgtactattgcgcccggggaccatactactactacatggatgtctgggggaaggggactatggtcaccgtgtcatccgcctcgggaggcggcggatcaggaggacgcgcctctggtggtggaggatcggagatcgtgatgacccagagccctctctccttgcccgtgactcctggggagcccgcatccatttcatgccggagctcccagtcacttctctactccaacggctataactacgtggattggtacctccaaaagccgggccagagcccgcagctgctgatctacctgggctcgaacagggccagcggagtgcctgaccggttctccgggtcgggaagcgggaccgacttcaagctgcaaatctcgagagtggaggccgaggacgtgggaatctactactgtatgcagggccgccagtttccgtactcgttcggacagggcaccaaagtggaaatcaagaccactaccccagcaccgaggccacccaccccggctcctaccatcgcctcccagcctctgtccctgcgtccggaggcatgtagacccgcagctggtggggccgtgcatacccggggtcttgacttcgcctgcgatatctacatttgggcccctctggctggtacttgcggggtcctgctgctttcactcgtgatcactctttactgtaagcgcggtcggaagaagctgctgtacatctttaagcaacccttcatgaggcctgtgcagactactcaagaggaggacggctgttcatgccggttcccagaggaggaggaaggcggctgcgaactgcgcgtgaaattcagccgcagcgcagatgctccagcctacaagcaggggcagaaccagctctacaacgaactcaatcttggtcggagagaggagtacgacgtgctggacaagcggagaggacgggacccagaaatgggcgggaagccgcgcagaaagaatccccaagagggcctgtacaacgagctccaaaaggataagatggcagaagcctatagcgagattggtatgaaaggggaacgcagaagaggcaaaggccacgacggactgtaccagggactcagcaccgccaccaaggacacctatgacgctcttcacatgcaggccctgccgcctcgg

SEQ ID NO: 120 - DNA, 1446 bp, Artificial Sequence
  source: /note="Description of Artificial Sequence: Synthetic polynucleotide"
atggccctccctgtcaccgccctgctgcttccgctggctcttctgctccacgccgctcggcccgaagtgcaattgctcgaaactggaggaggtctggtgcaacctggaggatcacttcgcctgtcctgcgccgtgtcgggctttgccctgtccaaccatggaatgagctgggtccgccgcgcgccggggaagggcctcgaatgggtgtccggcatcgtctactccggctccacctactacgccgcgtccgtgaagggccggttcacgatttcacgggacaactcgcggaacaccctgtacctccaaatgaattcccttcggccggaggatactgccatctactactgctccgcccacggtggcgaatccgacgtctggggccagggaaccaccgtgaccgtgtccagcgcgtccgggggaggaggaagcgggggtagagcatcgggtggaggcggatcagagatcgtgctgacccagtcccccgccaccttgagcgtgtcaccaggagagtccgccaccctgtcatgccgcgccagccagtccgtgtcctccaacctggcttggtaccagcagaagccggggcaggcccctagactcctgatctatggggcgtcgacccgggcatctggaattcccgataggttcagcggatcgggctcgggcactgacttcactctgaccatctcctcgctgcaagccgaggacgtggctgtgtactactgtcagcagtacggaagctccctgactttcggtggcgggaccaaagtcgagattaagaccactaccccagcaccgaggccacccaccccggctcctaccatcgcctcccagcctctgtccctgcgtccggaggcatgtagacccgcagctggtggggccgtgcatacccggggtcttgacttcgcctgcgatatctacatttgggcccctctggctggtacttgcggggtcctgctgctttcactcgtgatcactctttactgtaagcgcggtcggaagaagctgctgtacatctttaagcaacccttcatgaggcctgtgcagactactcaagaggaggacggctgttcatgccggttcccagaggaggaggaaggcggctgcgaactgcgcgtgaaattcagccgcagcgcagatgctccagcctacaagcaggggcagaaccagctctacaacgaactcaatcttggtcggagagaggagtacgacgtgctggacaagcggagaggacgggacccagaaatgggcgggaagccgcgcagaaagaatccccaagagggcctgtacaacgagctccaaaaggataagatggcagaagcctatagcgagattggtatgaaaggggaacgcagaagaggcaaaggccacgacggactgtaccagggactcagcaccgccaccaaggacacctatgacgctcttcacatgcaggccctgccgcctcgg

SEQ ID NO: 121 - DNA, 1449 bp, Artificial Sequence
  source: /note="Description of Artificial Sequence: Synthetic polynucleotide"
atggccctccctgtcaccgccctgctgcttccgctggctcttctgctccacgccgctcggcccgaagtgcaattggtggaaactggaggaggacttgtgcaacctggaggatcattgagactgagctgcgcagtgtcgggattcgccctgagcaaccatggaatgtcctgggtcagaagggcccctggaaaaggcctcgaatgggtgtcagggatcgtgtactccggttccacttactacgccgcctccgtgaaggggcgcttcactatctcacgggataactcccgcaataccctgtacctccaaatgaacagcctgcggccggaggataccgccatctactactgttccgcccacggtggagagtctgacgtctggggccagggaactaccgtgaccgtgtcctccgcgtccggcggtggagggagcggcggccgcgccagcggcggcggaggctccgagatcgtgatgacccagagccccgctactctgtcggtgtcgcccggagaaagggcgaccctgtcctgccgggcgtcgcagtccgtgagcagcaagctggcttggtaccagcagaagccgggccaggcaccacgcctgcttatgtacggtgcctccattcgggccaccggaatcccggaccggttctcggggtcggggtccggtaccgagttcacactgaccatttcctcgctcgagcccgaggactttgccgtctattactgccagcagtacggctcctcctcatggacgttcggccaggggaccaaggtcgaaatcaagaccactaccccagcaccgaggccacccaccccggctcctaccatcgcctcccagcctctgtccctgcgtccggaggcatgtagacccgcagctggtggggccgtgcatacccggggtcttgacttcgcctgcgatatctacatttgggcccctctggctggtacttgcggggtcctgctgctttcactcgtgatcactctttactgtaagcgcggtcggaagaagctgctgtacatctttaagcaacccttcatgaggcctgtgcagactactcaagaggaggacggctgttcatgccggttcccagaggaggaggaaggcggctgcgaactgcgcgtgaaattcagccgcagcgcagatgctccagcctacaagcaggggcagaaccagctctacaacgaactcaatcttggtcggagagaggagtacgacgtgctggacaagcggagaggacgggacccagaaatgggcgggaagccgcgcagaaagaatccccaagagggcctgtacaacgagctccaaaaggataagatggcagaagcctatagcgagattggtatgaaaggggaacgcagaagaggcaaaggccacgacggactgtaccagggactcagcaccgccaccaaggacacctatgacgctcttcacatgcaggccctgccgcctcgg

SEQ ID NO: 122 - DNA, 1455 bp, Artificial Sequence
  source: /note="Description of Artificial Sequence: Synthetic polynucleotide"
atggccctccctgtcaccgccctgctgcttccgctggctcttctgctccacgccgctcggcccgaagtgcaattggtggagactggaggaggagtggtgcaacctggaggaagcctgagactgtcatgcgcggtgtcgggcttcgccctctccaaccacggaatgtcctgggtccgccgggcccctgggaaaggacttgaatgggtgtccggcatcgtgtactcgggttccacctactacgcggcctcagtgaagggccggtttactattagccgcgacaactccagaaacacactgtacctccaaatgaactcgctgcggccggaagataccgctatctactactgctccgcccatgggggagagtcggacgtctggggacagggcaccactgtcactgtgtccagcgcttccggcggtggtggaagcgggggacgggcctcaggaggcggtggcagcgagattgtgctgacccagtcccccgggaccctgagcctgtccccgggagaaagggccaccctctcctgtcgggcatcccagtccgtggggtctactaaccttgcatggtaccagcagaagcccggccaggcccctcgcctgctgatctacgacgcgtccaatagagccaccggcatcccggatcgcttcagcggaggcggatcgggcaccgacttcaccctcaccatttcaaggctggaaccggaggacttcgccgtgtactactgccagcagtatggttcgtccccaccctggacgttcggccaggggactaaggtcgagatcaagaccactaccccagcaccgaggccacccaccccggctcctaccatcgcctcccagcctctgtccctgcgtccggaggcatgtagacccgcagctggtggggccgtgcatacccggggtcttgacttcgcctgcgatatctacatttgggcccctctggctggtacttgcggggtcctgctgctttcactcgtgatcactctttactgtaagcgcggtcggaagaagctgctgtacatctttaagcaacccttcatgaggcctgtgcagactactcaagaggaggacggctgttcatgccggttcccagaggaggaggaaggcggctgcgaactgcgcgtgaaattcagccgcagcgcagatgctccagcctacaagcaggggcagaaccagctctacaacgaactcaatcttggtcggagagaggagtacgacgtgctggacaagcggagaggacgggacccagaaatgggcgggaagccgcgcagaaagaatccccaagagggcctgtacaacgagctccaaaaggataagatggcagaagcctatagcgagattggtatgaaaggggaacgcagaagaggcaaaggccacgacggactgtaccagggactcagcaccgccaccaaggacacctatgacgctcttcacatgcaggccctgccgcctcgg

SEQ ID NO: 123 - DNA, 1449 bp, Artificial Sequence
  source: /note="Description of Artificial Sequence: Synthetic polynucleotide"
atggccctccctgtcaccgccctgctgcttccgctggctcttctgctccacgccgctcggccccaagtgcaactcgtggaatctggtggaggactcgtgaaacctggaggatcattgagactgtcatgcgcggcctcgggattcacgttctccgattactacatgagctggattcgccaggctccggggaagggactggaatgggtgtcctacatttcctcatccggctccaccatctactacgcggactccgtgaaggggagattcaccattagccgcgataacgccaagaacagcctgtaccttcagatgaactccctgcgggctgaagatactgccgtctactactgcgcaagggagagcggagatgggatggacgtctggggacagggtaccactgtgaccgtgtcgtcggcctccggcggagggggttcgggtggaagggccagcggcggcggaggcagcgacatccagatgacccagtccccctcatcgctgtccgcctccgtgggcgaccgcgtcaccatcacatgccgggcctcacagtcgatctcctcctacctcaattggtatcagcagaagcccggaaaggcccctaagcttctgatctacgcagcgtcctccctgcaatccggggtcccatctcggttctccggctcgggcagcggtaccgacttcactctgaccatctcgagcctgcagccggaggacttcgccacttactactgtcagcaaagctacaccctcgcgtttggccagggcaccaaagtggacatcaagaccactaccccagcaccgaggccacccaccccggctcctaccatcgcctcccagcctctgtccctgcgtccggaggcatgtagacccgcagctggtggggccgtgcatacccggggtcttgacttcgcctgcgatatctacatttgggcccctctggctggtacttgcggggtcctgctgctttcactcgtgatcactctttactgtaagcgcggtcggaagaagctgctgtacatctttaagcaacccttcatgaggcctgtgcagactactcaagaggaggacggctgttcatgccggttcccagaggaggaggaaggcggctgcgaactgcgcgtgaaattcagccgcagcgcagatgctccagcctacaagcaggggcagaaccagctctacaacgaactcaatcttggtcggagagaggagtacgacgtgctggacaagcggagaggacgggacccagaaatgggcgggaagccgcgcagaaagaatccccaagagggcctgtacaacgagctccaaaaggataagatggcagaagcctatagcgagattggtatgaaaggggaacgcagaagaggcaaaggccacgacggactgtaccagggactcagcaccgccaccaaggacacctatgacgctcttcacatgcaggccctgccgcctcgg

SEQ ID NO: 124 - DNA, 1449 bp, Artificial Sequence
  source: /note="Description of Artificial Sequence: Synthetic polynucleotide"
atggccctccctgtcaccgccctgctgcttccgctggctcttctgctccacgccgctcggcccgaagtgcaattggtggaatcagggggaggacttgtgcagcctggaggatcgctgagactgtcatgtgccgtgtccggctttgccctgtccaaccacgggatgtcctgggtccgccgcgcgcctggaaagggcctcgaatgggtgtcgggtattgtgtacagcggtagcacctactatgccgcatccgtgaaggggagattcaccatcagccgggacaactccaggaacactctgtacctccaaatgaattcgctgaggccagaggacactgccatctactactgctccgcgcatggcggagagtccgacgtctggggacaggggaccaccgtgaccgtgtctagcgcgtccggcggaggcggcagcgggggtcgggcatcagggggcggcggatcggacatccagctcacccagtccccgagctcgctgtccgcctccgtgggagatcgggtcaccatcacgtgccgcgccagccagtcgatttcctcctacctgaactggtaccaacagaagcccggaaaagccccgaagcttctcatctacgccgcctcgagcctgcagtcaggagtgccctcacggttctccggctccggttccggtactgatttcaccctgaccatttcctccctgcaaccggaggacttcgctacttactactgccagcagtcgtactccaccccctacactttcggacaaggcaccaaggtcgaaatcaagaccactaccccagcaccgaggccacccaccccggctcctaccatcgcctcccagcctctgtccctgcgtccggaggcatgtagacccgcagctggtggggccgtgcatacccggggtcttgacttcgcctgcgatatctacatttgggcccctctggctggtacttgcggggtcctgctgctttcactcgtgatcactctttactgtaagcgcggtcggaagaagctgctgtacatctttaagcaacccttcatgaggcctgtgcagactactcaagaggaggacggctgttcatgccggttcccagaggaggaggaaggcggctgcgaactgcgcgtgaaattcagccgcagcgcagatgctccagcctacaagcaggggcagaaccagctctacaacgaactcaatcttggtcggagagaggagtacgacgtgctggacaagcggagaggacgggacccagaaatgggcgggaagccgcgcagaaagaatccccaagagggcctgtacaacgagctccaaaaggataagatggcagaagcctatagcgagattggtatgaaaggggaacgcagaagaggcaaaggccacgacggactgtaccagggactcagcaccgccaccaaggacacctatgacgctcttcacatgcaggccctgccgcctcgg

SEQ ID NO: 125 - DNA, 1470 bp, Artificial Sequence
  source: /note="Description of Artificial Sequence: Synthetic polynucleotide"
atggccctccctgtcaccgccctgctgcttccgctggctcttctgctccacgccgctcggccccaagtgcaactggtgcaaagcggaggaggattggtcaaacccggaggaagcctgagactgtcatgcgcggcctctggattcaccttctccgattactacatgtcatggatcagacaggccccggggaagggcctcgaatgggtgtcctacatctcgtcctccgggaacaccatctactacgccgacagcgtgaagggccgctttaccatttcccgcgacaacgcaaagaactcgctgtaccttcagatgaattccctgcgggctgaagataccgcggtgtactattgcgcccggtccactatggtccgggaggactactggggacagggcacactcgtgaccgtgtccagcgcgagcgggggtggaggcagcggtggacgcgcctccggcggcggcggttcagacatcgtgctgactcagtcgcccctgtcgctgccggtcaccctgggccaaccggcctcaattagctgcaagtcctcggagagcctggtgcacaactcaggaaagacttacctgaactggttccatcagcggcctggacagtccccacggaggctcatctatgaagtgtccaacagggattcgggggtgcccgaccgcttcactggctccgggtccggcaccgacttcaccttgaaaatctccagagtggaagccgaggacgtgggcgtgtactactgtatgcagggtacccactggcctggaacctttggacaaggaactaagctcgagattaagaccactaccccagcaccgaggccacccaccccggctcctaccatcgcctcccagcctctgtccctgcgtccggaggcatgtagacccgcagctggtggggccgtgcatacccggggtcttgacttcgcctgcgatatctacatttgggcccctctggctggtacttgcggggtcctgctgctttcactcgtgatcactctttactgtaagcgcggtcggaagaagctgctgtacatctttaagcaacccttcatgaggcctgtgcagactactcaagaggaggacggctgttcatgccggttcccagaggaggaggaaggcggctgcgaactgcgcgtgaaattcagccgcagcgcagatgctccagcctacaagcaggggcagaaccagctctacaacgaactcaatcttggtcggagagaggagtacgacgtgctggacaagcggagaggacgggacccagaaatgggcgggaagccgcgcagaaagaatccccaagagggcctgtacaacgagctccaaaaggataagatggcagaagcctatagcgagattggtatgaaaggggaacgcagaagaggcaaaggccacgacggactgtaccagggactcagcaccgccaccaaggacacctatgacgctcttcacatgcaggccctgccgcctcgg

SEQ ID NO: 126 - DNA, 1449 bp, Artificial Sequence
  source: /note="Description of Artificial Sequence: Synthetic polynucleotide"
atggccctccctgtcaccgccctgctgcttccgctggctcttctgctccacgccgctcggccccaagtgcaactcgtggaatctggtggaggactcgtgcaacccggtggaagccttaggctgtcgtgcgccgtcagcgggtttgctctgagcaaccatggaatgtcctgggtccgccgggcaccgggaaaagggctggaatgggtgtccggcatcgtgtacagcgggtcaacctattacgccgcgtccgtgaagggcagattcactatctcaagagacaacagccggaacaccctgtacttgcaaatgaattccctgcgccccgaggacaccgccatctactactgctccgcccacggaggagagtcggacgtgtggggccagggaacgactgtgactgtgtccagcgcatcaggagggggtggttcgggcggccgggcctcggggggaggaggttccgacattcggctgacccagtccccgtccccactgtcggcctccgtcggcgaccgcgtgaccatcacttgtcaggcgtccgaggacattaacaagttcctgaactggtaccaccagacccctggaaaggcccccaagctgctgatctacgatgcctcgacccttcaaactggagtgcctagccggttctccgggtccggctccggcactgatttcactctgaccatcaactcattgcagccggaagatatcgggacctactattgccagcagtacgaatccctcccgctcacattcggcgggggaaccaaggtcgagattaagaccactaccccagcaccgaggccacccaccccggctcctaccatcgcctcccagcctctgtccctgcgtccggaggcatgtagacccgcagctggtggggccgtgcatacccggggtcttgacttcgcctgcgatatctacatttgggcccctctggctggtacttgcggggtcctgctgctttcactcgtgatcactctttactgtaagcgcggtcggaagaagctgctgtacatctttaagcaacccttcatgaggcctgtgcagactactcaagaggaggacggctgttcatgccggttcccagaggaggaggaaggcggctgcgaactgcgcgtgaaattcagccgcagcgcagatgctccagcctacaagcaggggcagaaccagctctacaacgaactcaatcttggtcggagagaggagtacgacgtgctggacaagcggagaggacgggacccagaaatgggcgggaagccgcgcagaaagaatccccaagagggcctgtacaacgagctccaaaaggataagatggcagaagcctatagcgagattggtatgaaaggggaacgcagaagaggcaaaggccacgacggactgtaccagggactcagcaccgccaccaaggacacctatgacgctcttcacatgcaggccctgccgcctcgg

SEQ ID NO: 127 - DNA, 1452 bp, Artificial Sequence
  source: /note="Description of Artificial Sequence: Synthetic polynucleotide"
atggccctccctgtcaccgccctgctgcttccgctggctcttctgctccacgccgctcggcccgaagtgcaattggtggaaactggaggaggacttgtgcaacctggaggatcattgcggctctcatgcgctgtctccggcttcgccctgtcaaatcacgggatgtcgtgggtcagacgggccccgggaaagggtctggaatgggtgtcggggattgtgtacagcggctccacctactacgccgcttcggtcaagggccgcttcactatttcacgggacaacagccgcaacaccctctatctgcaaatgaactctctccgcccggaggataccgccatctactactgctccgcacacggcggcgaatccgacgtgtggggacagggaaccactgtcaccgtgtcgtccgcatccggtggcggaggatcgggtggccgggcctccgggggcggcggcagcgagactaccctgacccagtcccctgccactctgtccgtgagcccgggagagagagccacccttagctgccgggccagccagagcgtgggctccaacctggcctggtaccagcagaagccaggacagggtcccaggctgctgatctacggagcctccactcgcgcgaccggcatccccgcgaggttctccgggtcgggttccgggaccgagttcaccctgaccatctcctccctccaaccggaggacttcgcggtgtactactgtcagcagtacaacgattggctgcccgtgacatttggacaggggacgaaggtggaaatcaaaaccactaccccagcaccgaggccacccaccccggctcctaccatcgcctcccagcctctgtccctgcgtccggaggcatgtagacccgcagctggtggggccgtgcatacccggggtcttgacttcgcctgcgatatctacatttgggcccctctggctggtacttgcggggtcctgctgctttcactcgtgatcactctttactgtaagcgcggtcggaagaagctgctgtacatctttaagcaacccttcatgaggcctgtgcagactactcaagaggaggacggctgttcatgccggttcccagaggaggaggaaggcggctgcgaactgcgcgtgaaattcagccgcagcgcagatgctccagcctacaagcaggggcagaaccagctctacaacgaactcaatcttggtcggagagaggagtacgacgtgctggacaagcggagaggacgggacccagaaatgggcgggaagccgcgcagaaagaatccccaagagggcctgtacaacgagctccaaaaggataagatggcagaagcctatagcgagattggtatgaaaggggaacgcagaagaggcaaaggccacgacggactgtaccagggactcagcaccgccaccaaggacacctatgacgctcttcacatgcaggccctgccgcctcgg

SEQ ID NO: 128 - DNA, 1455 bp, Artificial Sequence
  source: /note="Description of Artificial Sequence: Synthetic polynucleotide"
atggccctccctgtcaccgccctgctgcttccgctggctcttctgctccacgccgctcggcccgaagtgcaattggtggaatctggtggaggacttgtgcaacctggaggatcactgagactgtcatgcgcggtgtccggttttgccctgagcaatcatgggatgtcgtgggtccggcgcgcccccggaaagggtctggaatgggtgtcgggtatcgtctactccgggagcacttactacgccgcgagcgtgaagggccgcttcaccatttcccgcgataactcccgcaacaccctgtacttgcaaatgaactcgctccggcctgaggacactgccatctactactgctccgcacacggaggagaatccgacgtgtggggccagggaactaccgtgaccgtcagcagcgcctccggcggcgggggctcaggcggacgggctagcggcggcggtggctccgagatcgtgctgacccagtcgcctggcactctctcgctgagccccggggaaagggcaaccctgtcctgtcgggccagccagtccattggatcatcctccctcgcctggtatcagcagaaaccgggacaggctccgcggctgcttatgtatggggccagctcaagagcctccggcattcccgaccggttctccgggtccggttccggcaccgatttcaccctgactatctcgaggctggagccagaggacttcgccgtgtactactgccagcagtacgcggggtccccgccgttcacgttcggacagggaaccaaggtcgagatcaagaccactaccccagcaccgaggccacccaccccggctcctaccatcgcctcccagcctctgtccctgcgtccggaggcatgtagacccgcagctggtggggccgtgcatacccggggtcttgacttcgcctgcgatatctacatttgggcccctctggctggtacttgcggggtcctgctgctttcactcgtgatcactctttactgtaagcgcggtcggaagaagctgctgtacatctttaagcaacccttcatgaggcctgtgcagactactcaagaggaggacggctgttcatgccggttcccagaggaggaggaaggcggctgcgaactgcgcgtgaaattcagccgcagcgcagatgctccagcctacaagcaggggcagaaccagctctacaacgaactcaatcttggtcggagagaggagtacgacgtgctggacaagcggagaggacgggacccagaaatgggcgggaagccgcgcagaaagaatccccaagagggcctgtacaacgagctccaaaaggataagatggcagaagcctatagcgagattggtatgaaaggggaacgcagaagaggcaaaggccacgacggactgtaccagggactcagcaccgccaccaaggacacctatgacgctcttcacatgcaggccctgccgcctcgg

SEQ ID NO: 129 - protein, 243 aa, Artificial Sequence
  source: /note="Description of Artificial Sequence: Synthetic polypeptide"
QVQLQESGPGLVKPSETLSLTCTVSGGSISSSYYYWGWIRQPPGKGLEWIGSIYYSGSAYYNPSLKSRVTISVDTSKNQFSLRLSSVTAADTAVYYCARHWQEWPDAFDIWGQGTMVTVSSGGGGSGGGGSGGGGSETTLTQSPAFMSATPGDKVIISCKASQDIDDAMNWYQQKPGEAPLFIIQSATSPVPGIPPRFSGSGFGTDFSLTINNIESEDAAYYFCLQHDNFPLTFGQGTKLEIK

SEQ ID NO: 130 - protein, 244 aa, Artificial Sequence
  source: /note="Description of Artificial Sequence: Synthetic polypeptide"
VNLRESGPALVKPTQTLTLTCTFSGFSLRTSGMCVSWIRQPPGKALEWLARIDWDEDKFYSTSLKTRLTISKDTSDNQVVLRMTNMDPADTATYYCARSGAGGTSATAFDIWGPGTMVTVSSGGGGSGGGGSGGGGSDIQMTQSPSSLSASVGDRVTITCRASQDIYNNLAWFQLKPGSAPRSLMYAANKSQSGVPSRFSGSASGTDFTLTISSLQPEDFATYYCQHYYRFPYSFGQGTKLEIK

SEQ ID NO: 131 - protein, 246 aa, Artificial Sequence
  source: /note="Description of Artificial Sequence: Synthetic polypeptide"
EVQLVESGGGLVKPGGSLRLSCAASGFTFSSYSMNWVRQAPGKGLEWVSSISSSSSYIYYADSVKGRFTISRDNAKNSLYLQMNSLRAEDTAVYYCAKTIAAVYAFDIWGQGTTVTVSSGGGGSGGGGSGGGGSEIVLTQSPLSLPVTPEEPASISCRSSQSLLHSNGYNYLDWYLQKPGQSPQLLIYLGSNRASGVPDRFSGSGSGTDFTLKISRVEAEDVGVYYCMQALQTPYTFGQGTKLEIK

SEQ ID NO: 132 - protein, 240 aa, Artificial Sequence
  source: /note="Description of Artificial Sequence: Synthetic polypeptide"
EVQLVESGGGLVKPGGSLRLSCAASGFTFSDYYMSWIRQAPGKGLEWVSYISSSGSTIYYADSVKGRFTISRDNAKNSLYLQMNSLRAEDTAVYYCARDLRGAFDIWGQGTMVTVSSGGGGSGGGGSGGGGSSYVLTQSPSVSAAPGYTATISCGGNNIGTKSVHWYQQKPGQAPLLVIRDDSVRPSKIPGRFSGSNSGNMATLTISGVQAGDEADFYCQVWDSDSEHVVFGGGTKLTVL

SEQ ID NO: 133 - protein, 241 aa, Artificial Sequence
  source: /note="Description of Artificial Sequence: Synthetic polypeptide"
QVQLVQSGAEVKKPGASVKVSCKPSGYTVTSHYIHWVRRAPGQGLEWMGMINPSGGVTAYSQTLQGRVTMTSDTSSSTVYMELSSLRSEDTAMYYCAREGSGSGWYFDFWGRGTLVTVSSGGGGSGGGGSGGGGSSYVLTQPPSVSVSPGQTASITCSGDGLSKKYVSWYQQKAGQSPVVLISRDKERPSGIPDRFSGSNSADTATLTISGTQAMDEADYYCQAWDDTTVVFGGGTKLTVL

SEQ ID NO: 134 - protein, 245 aa, Artificial Sequence
  source: /note="Description of Artificial Sequence: Synthetic polypeptide"
QVQLQESGPGLVKPSQTLSLTCTVSGGSISSGGYYWSWIRQHPGKGLEWIGYIYYSGSTYYNPSLKSRVTISVDTSKNQFSLKLSSVTAADTAVYYCARAGIAARLRGAFDIWGQGTMVTVSSGGGGSGGGGSGGGGSDIVMTQSPSSVSASVGDRVIITCRASQGIRNWLAWYQQKPGKAPNLLIYAASNLQSGVPSRFSGSGSGADFTLTISSLQPEDVATYYCQKYNSAPFTFGPGTKVDIK

SEQ ID NO: 135 - protein, 253 aa, Artificial Sequence
  source: /note="Description of Artificial Sequence: Synthetic polypeptide"
QVQLVQSGAEVKKPGSSVKVSCKASGGTFSSYAISWVRQAPGQGLEWMGGIIPIFGTANYAQKFQGRVTITADESTSTAYMELSSLRSEDTAVYYCARRGGYQLLRWDVGLLRSAFDIWGQGTMVTVSSGGGGSGGGGSGGGGSSYVLTQPPSVSVAPGQTARITCGGNNIGSKSVHWYQQKPGQAPVLVLYGKNNRPSGVPDRFSGSRSGTTASLTITGAQAEDEADYYCSSRDSSGDHLRVFGTGTKVTVL

SEQ ID NO: 136 - protein, 248 aa, Artificial Sequence
  source: /note="Description of Artificial Sequence: Synthetic polypeptide"
EVQLQQSGPGLVKPSQTLSLTCAISGDSVSSNSAAWNWIRQSPSRGLEWLGRTYYRSKWYSFYAISLKSRIIINPDTSKNQFSLQLKSVTPEDTAVYYCARSSPEGLFLYWFDPWGQGTLVTVSSGGDGSGGGGSGGGGSSSELTQDPAVSVALGQTIRITCQGDSLGNYYATWYQQKPGQAPVLVIYGTNNRPSGIPDRFSASSSGNTASLTITGAQAEDEADYYCNSRDSSGHHLLFGTGTKVTVL

SEQ ID NO: 137 - protein, 246 aa, Artificial Sequence
  source: /note="Description of Artificial Sequence: Synthetic polypeptide"
EVQLVESGGGLVQPGGSLRLSCAASGFTFSSYAMSWVRQAPGKGLEWVSAISGSGGSTYYADSVKGRFTISRDNSKNTLYLQMNSLRAEDTAVYYCAKVEGSGSLDYWGQGTLVTVSSGGGGSGGGGSGGGGSEIVMTQSPGTLSLSPGERATLSCRASQSVSSAYLAWYQQKPGQPPRLLISGASTRATGIPDRFGGSGSGTDFTLTISRLEPEDFAVYYCQHYGSSFNGSSLFTFGQGTRLEIK

SEQ ID NO: 138 - protein, 241 aa, Artificial Sequence
  source: /note="Description of Artificial Sequence: Synthetic polypeptide"
EVQLVETGGGLVQPGGSLRLSCAASGITFSRYPMSWVRQAPGKGLEWVSGISDSGVSTYYADSAKGRFTISRDNSKNTLFLQMSSLRDEDTAVYYCVTRAGSEASDIWGQGTMVTVSSGGGGSGGGGSGGGGSEIVLTQSPATLSLSPGERATLSCRASQSVSNSLAWYQQKPGQAPRLLIYDASSRATGIPDRFSGSGSGTDFTLTISRLEPEDFAIYYCQQFGTSSGLTFGGGTKLEIK

SEQ ID NO: 139 - protein, 248 aa, Artificial Sequence
  source: /note="Description of Artificial Sequence: Synthetic polypeptide"
QVQLVESGGGLVQPGGSLRLSCAASGFTFSSYAMSWVRQAPGKGLEWVSAISGSGGSTYYADSVKGRFTISRDNAKNSLYLQMNSLRAEDTAIYYCARATYKRELRYYYGMDVWGQGTMVTVSSGGGGSGGGGSGGGGSEIVMTQSPGTVSLSPGERATLSCRASQSVSSSFLAWYQQKPGQAPRLLIYGASSRATGIPDRFSGSGSGTDFTLTISRLEPEDSAVYYCQQYHSSPSWTFGQGTRLEIK

SEQ ID NO: 140 - protein, 248 aa, Artificial Sequence
  source: /note="Description of Artificial Sequence: Synthetic polypeptide"
EVQLVETGGGLVQPGGSLRLSCAASGFTFSSYAMSWVRQAPGKGLEWVSAISGSGGSTYYADSVKGRFTISRDNSKNTLYLQMNTLKAEDTAVYYCARATYKRELRYYYGMDVWGQGTTVTVSSGGGGSGGGGSGGGGSEIVLTQSPSTLSLSPGESATLSCRASQSVSTTFLAWYQQKPGQAPRLLIYGSSNRATGIPDRFSGSGSGTDFTLTIRRLEPEDFAVYYCQQYHSSPSWTFGQGTKVEIK

SEQ ID NO: 141 - protein, 239 aa, Artificial Sequence
  source: /note="Description of Artificial Sequence: Synthetic polypeptide"
EVQLVETGGGLVQPGRSLRLSCAASGFTFDDYAMHWVRQAPGKGLEWVSGISWNSGSIGYADSVKGRFTISRDNAKNSLYLQMNSLRDEDTAVYYCARVGKAVPDVWGQGTTVTVSSGGGGSGGGGSGGGGSDIVMTQTPSSLSASVGDRVTITCRASQSISSYLNWYQQKPGKAPKLLIYAASSLQSGVPSRFSGSGSGTDFTLTISSLQPEDFATYYCQQSYSTPYSFGQGTRLEIK

SEQ ID NO: 142 - protein, 246 aa, Artificial Sequence
  source: /note="Description of Artificial Sequence: Synthetic polypeptide"
EVQLVESGGGLVQPGRSLRLSCTASGFTFDDYAMHWVRQRPGKGLEWVASINWKGNSLAYGDSVKGRFAISRDNAKNTVFLQMNSLRTEDTAVYYCASHQGVAYYNYAMDVWGRGTLVTVSSGGGGSGGGGSGGGGSEIVLTQSPGTLSLSPGERATLSCRATQSIGSSFLAWYQQRPGQAPRLLIYGASQRATGIPDRFSGRGSGTDFTLTISRVEPEDSAVYYCQHYESSPSWTFGQGTKVEIK

SEQ ID NO: 143 - protein, 241 aa, Artificial Sequence
  source: /note="Description of Artificial Sequence: Synthetic polypeptide"
EVQLVESGGGLVQPGGSLRLSCAASGFTFSSYAMSWVRQAPGKGLEWVSAISGSGGSTYYADSVKGRFTISRDNSKNTLYLQMNSLRAEDTAVYYCAKVVRDGMDVWGQGTTVTVSSGGGGSGGGGSGGGGSEIVLTQSPATLSLSPGERATLSCRASQSVSSSYLAWYQQKPGQAPRLLIYGASSRATGIPDRFSGNGSGTDFTLTISRLEPEDFAVYYCQQYGSPPRFTFGPGTKVDIK

SEQ ID NO: 144 - protein, 242 aa, Artificial Sequence
  source: /note="Description of Artificial Sequence: Synthetic polypeptide"
EVQLLESGGGLVQPGGSLRLSCAASGFTFSSYAMSWVRQAPGKGLEWVSAISGSGGSTYYADSVKGRFTISRDNSKNTLYLQMNSLRAEDTAVYYCAKIPQTGTFDYWGQGTLVTVSSGGGGSGGGGSGGGGSEIVLTQSPGTLSLSPGERATLSCRASQSVSSSYLAWYQQRPGQAPRLLIYGASSRATGIPDRFSGSGSGTDFTLTISRLEPEDFAVYYCQHYGSSPSWTFGQGTRLEIK

SEQ ID NO: 145 - protein, 248 aa, Artificial Sequence
  source: /note="Description of Artificial Sequence: Synthetic polypeptide"
EVQLVETGGGLVQPGGSLRLSCAASGFTFSSYAMSWVRQAPGKGLEWVSAISGSGGSTYYADSVKGRFTMSRENDKNSVFLQMNSLRVEDTGVYYCARANYKRELRYYYGMDVWGQGTMVTVSSGGGGSGGGGSGGGGSEIVMTQSPGTLSLSPGESATLSCRASQRVASNYLAWYQHKPGQAPSLLISGASSRATGVPDRFSGSGSGTDFTLAISRLEPEDSAVYYCQHYDSSPSWTFGQGTKVEIK

SEQ ID NO: 146 - protein, 244 aa, Artificial Sequence
  source: /note="Description of Artificial Sequence: Synthetic polypeptide"
EVQLLETGGGLVQPGGSLRLSCAASGFSFSSYAMSWVRQAPGKGLEWVSAISGSGGSTYYADSVKGRFTISRDNSKNTLYLQMNSLRAEDTAVYYCAKALVGATGAFDIWGQGTLVTVSSGGGGSGGGGSGGGGSEIVLTQSPGTLSLSPGERATLSCRASQSLSSNFLAWYQQKPGQAPGLLIYGASNWATGTPDRFSGSGSGTDFTLTITRLEPEDFAVYYCQYYGTSPMYTFGQGTKVEIK

SEQ ID NO: 147 - protein, 244 aa, Artificial Sequence
  source: /note="Description of Artificial Sequence: Synthetic polypeptide"
EVQLLESGGGLVQPGGSLRLSCAASGFTFSSYAMSWVRQAPGKGLEWVSAISGSGGSTYYADSVKGRFTISRDNSKNTLYLQMNSLRAEDTAVYYCVLWFGEGFDPWGQGTLVTVSSGGGGSGGGGSGGGGSDIVLTQSPLSLPVTPGEPASISCRSSQSLLHSNGYNYLDWYLQKPGQSPQLLIYLGSNRASGVPDRFSGSGSGTDFTLKISRVEAEDVGVYYCMQALQTPLTFGGGTKVDIK

SEQ ID NO: 148 - protein, 251 aa, Artificial Sequence
  source: /note="Description of Artificial Sequence: Synthetic polypeptide"
QVQLVESGGGLVQPGGSLRLSCAASGFTFSSYAMSWVRQAPGKGLEWVSAISGSGGSTYYADSVKGRFTISRDNSKNTLYLQMNSLRAEDTAVYYCAKVGYDSSGYYRDYYGMDVWGQGTTVTVSSGGGGSGGGGSGGGGSEIVLTQSPGTLSLSPGERATLSCRASQSVSSSYLAWYQQKPGQAPRLLIYGTSSRATGISDRFSGSGSGTDFTLTISRLEPEDFAVYYCQHYGNSPPKFTFGPGTKLEIK

SEQ ID NO: 149 - protein, 246 aa, Artificial Sequence
  source: /note="Description of Artificial Sequence: Synthetic polypeptide"
EVQLVESGGGLVQPGGSLRLSCAASGFTFSSYAMSWVRQAPGKGLEWVSAISGSGGSTYYADSVKGRFTISRDNSKNTLYLQMNSLRAEDTAVYYCAKMGWSSGYLGAFDIWGQGTTVTVSSGGGGSGGGGSGGGGSEIVLTQSPGTLSLSPGERATLSCRASQSVASSFLAWYQQKPGQAPRLLIYGASGRATGIPDRFSGSGSGTDFTLTISRLEPEDFAVYYCQHYGGSPRLTFGGGTKVDIK

SEQ ID NO: 150 - DNA, 729 bp, Artificial Sequence
  source: /note="Description of Artificial Sequence: Synthetic polynucleotide"
caagtgcagcttcaggaaagcggaccgggcctggtcaagccatccgaaactctctccctgacttgcactgtgtctggcggttccatctcatcgtcgtactactactggggctggattaggcagccgcccggaaagggactggagtggatcggaagcatctactattccggctcggcgtactacaaccctagcctcaagtcgagagtgaccatctccgtggatacctccaagaaccagttttccctgcgcctgagctccgtgaccgccgctgacaccgccgtgtactactgtgctcggcattggcaggaatggcccgatgccttcgacatttggggccagggcactatggtcactgtgtcatccgggggtggaggcagcgggggaggagggtccggggggggaggttcagagacaaccttgacccagtcacccgcattcatgtccgccactccgggagacaaggtcatcatctcgtgcaaagcgtcccaggatatcgacgatgccatgaattggtaccagcagaagcctggcgaagcgccgctgttcattatccaatccgcaacctcgcccgtgcctggaatcccaccgcggttcagcggcagcggtttcggaaccgacttttccctgaccattaacaacattgagtccgaggacgccgcctactacttctgcctgcaacacgacaacttccctctcacgttcggccagggaaccaagctggaaatcaag

SEQ ID NO: 151 - DNA, 735 bp, Artificial Sequence
  source: /note="Description of Artificial Sequence: Synthetic polynucleotide"
caagtcaatctgcgcgaatccggccccgccttggtcaagcctacccagaccctcactctgacctgtactttctccggcttctccctgcggacttccgggatgtgcgtgtcctggatcagacagcctccgggaaaggccctggagtggctcgctcgcattgactgggatgaggacaagttctactccacctcactcaagaccaggctgaccatcagcaaagatacctctgacaaccaagtggtgctccgcatgaccaacatggacccagccgacactgccacttactactgcgcgaggagcggagcgggcggaacctccgccaccgccttcgatatttggggcccgggtaccatggtcaccgtgtcaagcggaggaggggggtccgggggcggcggttccgggggaggcggatcggacattcagatgactcagtcaccatcgtccctgagcgctagcgtgggcgacagagtgacaatcacttgccgggcatcccaggacatctataacaaccttgcgtggttccagctgaagcctggttccgcaccgcggtcacttatgtacgccgccaacaagagccagtcgggagtgccgtcccggttttccggttcggcctcgggaactgacttcaccctgacgatctccagcctgcaacccgaggatttcgccacctactactgccagcactactaccgctttccctactcgttcggacagggaaccaagctggaaatcaag

SEQ ID NO: 152 - DNA, 738 bp, Artificial Sequence
  source: /note="Description of Artificial Sequence: Synthetic polynucleotide"
gaagtgcagcttgtcgaatccggggggggactggtcaagccgggcggatcactgagactgtcctgcgccgcgagcggcttcacgttctcctcctactccatgaactgggtccgccaagcccccgggaagggactggaatgggtgtcctctatctcctcgtcgtcgtcctacatctactacgccgactccgtgaagggaagattcaccatttcccgcgacaacgcaaagaactcactgtacttgcaaatgaactcactccgggccgaagatactgctgtgtactattgcgccaagactattgccgccgtctacgctttcgacatctggggccagggaaccaccgtgactgtgtcgtccggtggtggtggctcgggcggaggaggaagcggcggcggggggtccgagattgtgctgacccagtcgccactgagcctccctgtgacccccgaggaacccgccagcatcagctgccggtccagccagtccctgctccactccaacggatacaattacctcgattggtaccttcagaagcctggacaaagcccgcagctgctcatctacttgggatcaaaccgcgcgtcaggagtgcctgaccggttctccggctcgggcagcggtaccgatttcaccctgaaaatctccagggtggaggcagaggacgtgggagtgtattactgtatgcaggcgctgcagactccgtacacatttgggcagggcaccaagctggagatcaag

SEQ ID NO: 153 - DNA, 720 bp, Artificial Sequence
  source: /note="Description of Artificial Sequence: Synthetic polynucleotide"
gaagtccagctcgtggagtccggcggaggccttgtgaagcctggaggttcgctgagactgtcctgcgccgcctccggcttcaccttctccgactactacatgtcctggatcagacaggccccgggaaagggcctggaatgggtgtcctacatctcgtcatcgggcagcactatctactacgcggactcagtgaaggggcggttcaccatttcccgggataacgcgaagaactcgctgtatctgcaaatgaactcactgagggccgaggacaccgccgtgtactactgcgcccgcgatctccgcggggcatttgacatctggggacagggaaccatggtcacagtgtccagcggagggggaggatcgggtggcggaggttccgggggtggaggctcctcctacgtgctgactcagagcccaagcgtcagcgctgcgcccggttacacggcaaccatctcctgtggcggaaacaacattgggaccaagtctgtgcactggtatcagcagaagccgggccaagctcccctgttggtgatccgcgatgactccgtgcggcctagcaaaattccgggacggttctccggctccaacagcggcaatatggccactctcaccatctcgggagtgcaggccggagatgaagccgacttctactgccaagtctgggactcagactccgagcatgtggtgttcgggggcggaaccaagctgactgtgctc

SEQ ID NO: 154 - DNA, 723 bp, Artificial Sequence
  source: /note="Description of Artificial Sequence: Synthetic polynucleotide"
caagtgcagctggtgcagagcggggccgaagtcaagaagccgggagcctccgtgaaagtgtcctgcaagccttcgggatacaccgtgacctcccactacattcattgggtccgccgcgcccccggccaaggactcgagtggatgggcatgatcaaccctagcggcggagtgaccgcgtacagccagacgctgcagggacgcgtgactatgacctcggatacctcctcctccaccgtctatatggaactgtccagcctgcggtccgaggataccgccatgtactactgcgcccgggaaggatcaggctccgggtggtatttcgacttctggggaagaggcaccctcgtgactgtgtcatctgggggagggggttccggtggtggcggatcgggaggaggcggttcatcctacgtgctgacccagccaccctccgtgtccgtgagccccggccagactgcatcgattacatgtagcggcgacggcctctccaagaaatacgtgtcgtggtaccagcagaaggccggacagagcccggtggtgctgatctcaagagataaggagcggcctagcggaatcccggacaggttctcgggttccaactccgcggacactgctactctgaccatctcggggacccaggctatggacgaagccgattactactgccaagcctgggacgacactactgtcgtgtttggagggggcaccaagttgaccgtcctt

SEQ ID NO: 155 - DNA, 735 bp, Artificial Sequence
  source: /note="Description of Artificial Sequence: Synthetic polynucleotide"
caagtgcagcttcaggagagcggcccgggactcgtgaagccgtcccagaccctgtccctgacttgcaccgtgtcgggaggaagcatctcgagcggaggctactattggtcgtggattcggcagcaccctggaaagggcctggaatggatcggctacatctactactccggctcgacctactacaacccatcgctgaagtccagagtgacaatctcagtggacacgtccaagaatcagttcagcctgaagctctcttccgtgactgcggccgacaccgccgtgtactactgcgcacgcgctggaattgccgcccggctgaggggtgccttcgacatttggggacagggcaccatggtcaccgtgtcctccggcggcggaggttccgggggtggaggctcaggaggaggggggtccgacatcgtcatgactcagtcgccctcaagcgtcagcgcgtccgtcggggacagagtgatcatcacctgtcgggcgtcccagggaattcgcaactggctggcctggtatcagcagaagcccggaaaggcccccaacctgttgatctacgccgcctcaaacctccaatccggggtgccgagccgcttcagcggctccggttcgggtgccgatttcactctgaccatctcctccctgcaacctgaagatgtggctacctactactgccaaaagtacaactccgcaccttttactttcggaccggggaccaaagtggacattaag

SEQ ID NO: 156 - DNA, 759 bp, Artificial Sequence
  source: /note="Description of Artificial Sequence: Synthetic polynucleotide"
caagtgcagctggtccagtcgggcgccgaggtcaagaagcccgggagctctgtgaaagtgtcctgcaaggcctccgggggcacctttagctcctacgccatctcctgggtccgccaagcaccgggtcaaggcctggagtggatggggggaattatccctatcttcggcactgccaactacgcccagaagttccagggacgcgtgaccattaccgcggacgaatccacctccaccgcttatatggagctgtccagcttgcgctcggaagataccgccgtgtactactgcgcccggaggggtggataccagctgctgagatgggacgtgggcctcctgcggtcggcgttcgacatctggggccagggcactatggtcactgtgtccagcggaggaggcggatcgggaggcggcggatcagggggaggcggttccagctacgtgcttactcaacccccttcggtgtccgtggccccgggacagaccgccagaatcacttgcggaggaaacaacattgggtccaagagcgtgcattggtaccagcagaagccaggacaggcccctgtgctggtgctctacgggaagaacaatcggcccagcggagtgccggacaggttctcgggttcacgctccggtacaaccgcttcactgactatcaccggggcccaggcagaggatgaagcggactactactgttcctcccgggattcatccggcgaccacctccgggtgttcggaaccggaacgaaggtcaccgtgctg

SEQ ID NO: 157 - DNA, 744 bp, Artificial Sequence
  source: /note="Description of Artificial Sequence: Synthetic polynucleotide"
gaagtgcagctccaacagtcaggaccggggctcgtgaagccatcccagaccctgtccctgacttgtgccatctcgggagatagcgtgtcatcgaactccgccgcctggaactggattcggcagagcccgtcccgcggactggagtggcttggaaggacctactaccggtccaagtggtactctttctacgcgatctcgctgaagtcccgcattatcattaaccctgatacctccaagaatcagttctccctccaactgaaatccgtcacccccgaggacacagcagtgtattactgcgcacggagcagccccgaaggactgttcctgtattggtttgacccctggggccaggggactcttgtgaccgtgtcgagcggcggagatgggtccggtggcggtggttcggggggcggcggatcatcatccgaactgacccaggacccggctgtgtccgtggcgctgggacaaaccatccgcattacgtgccagggagactccctgggcaactactacgccacttggtaccagcagaagccgggccaagcccctgtgttggtcatctacgggaccaacaacagaccttccggcatccccgaccggttcagcgcttcgtcctccggcaacactgccagcctgaccatcactggagcgcaggccgaagatgaggccgactactactgcaacagcagagactcctcgggtcatcacctcttgttcggaactggaaccaaggtcaccgtgctg

SEQ ID NO: 158 - DNA, 738 bp, Artificial Sequence
  source: /note="Description of Artificial Sequence: Synthetic polynucleotide"
gaagtgcagctcgtggagtcaggaggcggcctggtccagccgggagggtcccttagactgtcatgcgccgcaagcggattcactttctcctcctatgccatgagctgggtccgccaagcccccggaaagggactggaatgggtgtccgccatctcggggtctggaggctcaacttactacgctgactccgtgaagggacggttcaccattagccgcgacaactccaagaacaccctctacctccaaatgaactccctgcgggccgaggataccgccgtctactactgcgccaaagtggaaggttcaggatcgctggactactggggacagggtactctcgtgaccgtgtcatcgggcggaggaggttccggcggtggcggctccggcggcggagggtcggagatcgtgatgacccagagccctggtactctgagcctttcgccgggagaaagggccaccctgtcctgccgcgcttcccaatccgtgtcctccgcgtacttggcgtggtaccagcagaagccgggacagccccctcggctgctgatcagcggggccagcacccgggcaaccggaatcccagacagattcgggggttccggcagcggcacagatttcaccctgactatttcgaggttggagcccgaggactttgcggtgtattactgtcagcactacgggtcgtcctttaatggctccagcctgttcacgttcggacaggggacccgcctggaaatcaag

SEQ ID NO: 159 - DNA, 723 bp, Artificial Sequence
  source: /note="Description of Artificial Sequence: Synthetic polynucleotide"
gaagtgcaactggtggaaaccggtggcggcctggtgcagcctggaggatcattgaggctgtcatgcgcggccagcggtattaccttctcccggtaccccatgtcctgggtcagacaggccccggggaaagggcttgaatgggtgtccgggatctcggactccggtgtcagcacttactacgccgactccgccaagggacgcttcaccatttcccgggacaactcgaagaacaccctgttcctccaaatgagctccctccgggacgaggatactgcagtgtactactgcgtgacccgcgccgggtccgaggcgtctgacatttggggacagggcactatggtcaccgtgtcgtccggcggagggggctcgggaggcggtggcagcggaggaggagggtccgagatcgtgctgacccaatccccggccaccctctcgctgagccctggagaaagggcaaccttgtcctgtcgcgcgagccagtccgtgagcaactccctggcctggtaccagcagaagcccggacaggctccgagacttctgatctacgacgcttcgagccgggccactggaatccccgaccgcttttcggggtccggctcaggaaccgatttcaccctgacaatctcacggctggagccagaggatttcgccatctattactgccagcagttcggtacttcctccggcctgactttcggaggcggcacgaagctcgaaatcaag

SEQ ID NO: 160 - DNA, 744 bp, Artificial Sequence
  source: /note="Description of Artificial Sequence: Synthetic polynucleotide"
caagtgcagctcgtggaatcgggtggcggactggtgcagccggggggctcacttagactgtcctgcgcggccagcggattcactttctcctcctacgccatgtcctgggtcagacaggcccctggaaagggcctggaatgggtgtccgcaatcagcggcagcggcggctcgacctattacgcggattcagtgaagggcagattcaccatttcccgggacaacgccaagaactccttgtaccttcaaatgaactccctccgcgcggaagataccgcaatctactactgcgctcgggccacttacaagagggaactgcgctactactacgggatggacgtctggggccagggaaccatggtcaccgtgtccagcggaggaggaggatcgggaggaggcggtagcgggggtggagggtcggagatcgtgatgacccagtcccccggcactgtgtcgctgtcccccggcgaacgggccaccctgtcatgtcgggccagccagtcagtgtcgtcaagcttcctcgcctggtaccagcagaaaccgggacaagctccccgcctgctgatctacggagccagcagccgggccaccggtattcctgaccggttctccggttcggggtccgggaccgactttactctgactatctctcgcctcgagccagaggactccgccgtgtattactgccagcagtaccactcctccccgtcctggacgttcggacagggcacaaggctggagattaag

SEQ ID NO: 161 - DNA, 744 bp, Artificial Sequence
  source: /note="Description of Artificial Sequence: Synthetic polynucleotide"
gaggtgcagcttgtggaaaccggtggcggactggtgcagcccggaggaagcctcaggctgtcctgcgccgcgtccggcttcaccttctcctcgtacgccatgtcctgggtccgccaggcccccggaaagggcctggaatgggtgtccgccatctctggaagcggaggttccacgtactacgcggacagcgtcaagggaaggttcacaatctcccgcgataattcgaagaacactctgtaccttcaaatgaacaccctgaaggccgaggacactgctgtgtactactgcgcacgggccacctacaagagagagctccggtactactacggaatggacgtctggggccagggaactactgtgaccgtgtcctcgggagggggtggctccggggggggcggctccggcggaggcggttccgagattgtgctgacccagtcaccttcaactctgtcgctgtccccgggagagagcgctactctgagctgccgggccagccagtccgtgtccaccaccttcctcgcctggtatcagcagaagccggggcaggcaccacggctcttgatctacgggtcaagcaacagagcgaccggaattcctgaccgcttctcggggagcggttcaggcaccgacttcaccctgactatccggcgcctggaacccgaagatttcgccgtgtattactgtcaacagtaccactcctcgccgtcctggacctttggccaaggaaccaaagtggaaatcaag

SEQ ID NO: 162 - DNA, 717 bp, Artificial Sequence
  source: /note="Description of Artificial Sequence: Synthetic polynucleotide"
gaagtgcagctcgtggaaactggaggtggactcgtgcagcctggacggtcgctgcggctgagctgcgctgcatccggcttcaccttcgacgattatgccatgcactgggtcagacaggcgccagggaagggacttgagtgggtgtccggtatcagctggaatagcggctcaatcggatacgcggactccgtgaagggaaggttcaccatttcccgcgacaacgccaagaactccctgtacttgcaaatgaacagcctccgggatgaggacactgccgtgtactactgcgcccgcgtcggaaaagctgtgcccgacgtctggggccagggaaccactgtgaccgtgtccagcggcgggggtggatcgggcggtggagggtccggtggagggggctcagatattgtgatgacccagaccccctcgtccctgtccgcctcggtcggcgaccgcgtgactatcacatgtagagcctcgcagagcatctccagctacctgaactggtatcagcagaagccggggaaggccccgaagctcctgatctacgcggcatcatcactgcaatcgggagtgccgagccggttttccgggtccggctccggcaccgacttcacgctgaccatttcttccctgcaacccgaggacttcgccacttactactgccagcagtcctactccaccccttactccttcggccaaggaaccaggctggaaatcaag

SEQ ID NO: 163 - DNA, 738 bp, Artificial Sequence
  source: /note="Description of Artificial Sequence: Synthetic polynucleotide"
gaagtgcagctcgtggagagcgggggaggattggtgcagcccggaaggtccctgcggctctcctgcactgcgtctggcttcaccttcgacgactacgcgatgcactgggtcagacagcgcccgggaaagggcctggaatgggtcgcctcaatcaactggaagggaaactccctggcctatggcgacagcgtgaagggccgcttcgccatttcgcgcgacaacgccaagaacaccgtgtttctgcaaatgaattccctgcggaccgaggataccgctgtgtactactgcgccagccaccagggcgtggcatactataactacgccatggacgtgtggggaagagggacgctcgtcaccgtgtcctccgggggcggtggatcgggtggaggaggaagcggtggcgggggcagcgaaatcgtgctgactcagagcccgggaactctttcactgtccccgggagaacgggccactctctcgtgccgggccacccagtccatcggctcctccttccttgcctggtaccagcagaggccaggacaggcgccccgcctgctgatctacggtgcttcccaacgcgccactggcattcctgaccggttcagcggcagagggtcgggaaccgatttcacactgaccatttcccgggtggagcccgaagattcggcagtctactactgtcagcattacgagtcctccccttcatggaccttcggtcaagggaccaaagtggagatcaag

SEQ ID NO: 164 - protein, 11 aa, Artificial Sequence
  source: /note="Description of Artificial Sequence: Synthetic peptide"
RASQDISSWLA

SEQ ID NO: 165 - DNA, 726 bp, Artificial Sequence
  source: /note="Description of Artificial Sequence: Synthetic polynucleotide"
gaagtgcagctgctggagtccggcggtggattggtgcaaccggggggatcgctcagactgtcctgtgcggcgtcaggcttcaccttctcgagctacgccatgtcatgggtcagacaggcccctggaaagggtctggaatgggtgtccgccatttccgggagcgggggatctacatactacgccgatagcgtgaagggccgcttcaccatttcccgggacaactccaagaacactctctatctgcaaatgaactccctccgcgctgaggacactgccgtgtactactgcgccaaaatccctcagaccggcaccttcgactactggggacaggggactctggtcaccgtcagcagcggtggcggaggttcggggggaggaggaagcggcggcggagggtccgagattgtgctgacccagtcacccggcactttgtccctgtcgcctggagaaagggccaccctttcctgccgggcatcccaatccgtgtcctcctcgtacctggcctggtaccagcagaggcccggacaggccccacggcttctgatctacggagcaagcagccgcgcgaccggtatcccggaccggttttcgggctcgggctcaggaactgacttcaccctcaccatctcccgcctggaacccgaagatttcgctgtgtattactgccagcactacggcagctccccgtcctggacgttcggccagggaactcggctggagatcaag

SEQ ID NO: 166 - DNA, 744 bp, Artificial Sequence
  source: /note="Description of Artificial Sequence: Synthetic polynucleotide"
gaagtgcaactggtggaaaccggtggaggactcgtgcagcctggcggcagcctccggctgagctgcgccgcttcgggattcaccttttcctcctacgcgatgtcttgggtcagacaggcccccggaaaggggctggaatgggtgtcagccatctccggctccggcggatcaacgtactacgccgactccgtgaaaggccggttcaccatgtcgcgcgagaatgacaagaactccgtgttcctgcaaatgaactccctgagggtggaggacaccggagtgtactattgtgcgcgcgccaactacaagagagagctgcggtactactacggaatggacgtctggggacagggaactatggtgaccgtgtcatccggtggagggggaagcggcggtggaggcagcgggggcgggggttcagaaattgtcatgacccagtccccgggaactctttccctctcccccggggaatccgcgactttgtcctgccgggccagccagcgcgtggcctcgaactacctcgcatggtaccagcataagccaggccaagccccttccctgctgatttccggggctagcagccgcgccactggcgtgccggataggttctcgggaagcggctcgggtaccgatttcaccctggcaatctcgcggctggaaccggaggattcggccgtgtactactgccagcactatgactcatccccctcctggacattcggacagggcaccaaggtcgagatcaag

SEQ ID NO: 167 - DNA, 732 bp, Artificial Sequence
  source: /note="Description of Artificial Sequence: Synthetic polynucleotide"
gaagtgcagctgctcgaaaccggtggagggctggtgcagccagggggctccctgaggctttcatgcgccgctagcggattctccttctcctcttacgccatgtcgtgggtccgccaagcccctggaaaaggcctggaatgggtgtccgcgatttccgggagcggaggttcgacctattacgccgactccgtgaagggccgctttaccatctcccgggataactccaagaacactctgtacctccaaatgaactcgctgagagccgaggacaccgccgtgtattactgcgcgaaggcgctggtcggcgcgactggggcattcgacatctggggacagggaactcttgtgaccgtgtcgagcggaggcggcggctccggcggaggagggagcgggggcggtggttccgaaatcgtgttgactcagtccccgggaaccctgagcttgtcacccggggagcgggccactctctcctgtcgcgcctcccaatcgctctcatccaatttcctggcctggtaccagcagaagcccggacaggccccgggcctgctcatctacggcgcttcaaactgggcaacgggaacccctgatcggttcagcggaagcggatcgggtactgactttaccctgaccatcaccagactggaaccggaggacttcgccgtgtactactgccagtactacggcacctcccccatgtacacattcggacagggtaccaaggtcgagattaag

SEQ ID NO: 168 - DNA, 733 bp, Artificial Sequence
  source: /note="Description of Artificial Sequence: Synthetic polynucleotide"
gaagtgcagctgcttgagagcggtggaggtctggtgcagcccgggggatcactgcgcctgtcctgtgccgcgtccggtttcactttctcctcgtacgccatgtcgtgggtcagacaggcaccgggaaagggactggaatgggtgtcagccatttcgggttcggggggcagcacctactacgctgactccgtgaagggccggttcaccatttcccgcgacaactccaagaacaccttgtacctccaaatgaactccctgcgggccgaagataccgccgtgtattactgcgtgctgtggttcggagagggattcgacccgtggggacaaggaacactcgtgactgtgtcatccggcggaggcggcagcggtggcggcggttccggcggcggcggatctgacatcgtgttgacccagtcccctctgagcctgccggtcactcctggcgaaccagccagcatctcctgccggtcgagccagtccctcctgcactccaatgggtacaactacctcgattggtatctgcaaaagccgggccagagcccccagctgctgatctaccttgggtcaaaccgcgcttccggggtgcctgatagattctccgggtccgggagcggaaccgactttaccctgaaaatctcgagggtggaggccgaggacgtcggagtgtactactgcatgcaggcgctccagactcccctgaccttcggaggaggaacgaaggtcgacatcaaga

SEQ ID NO: 169 - DNA, 753 bp, Artificial Sequence
  source: /note="Description of Artificial Sequence: Synthetic polynucleotide"
caagtgcagctcgtggagtcaggcggaggactggtgcagcccgggggctccctgagactttcctgcgcggcatcgggttttaccttctcctcctatgctatgtcctgggtgcgccaggccccgggaaagggactggaatgggtgtccgcaatcagcggtagcgggggctcaacatactacgccgactccgtcaagggtcgcttcactatttcccgggacaactccaagaataccctgtacctccaaatgaacagcctcagggccgaggatactgccgtgtactactgcgccaaagtcggatacgatagctccggttactaccgggactactacggaatggacgtgtggggacagggcaccaccgtgaccgtgtcaagcggcggaggcggttcaggagggggaggctccggcggtggagggtccgaaatcgtcctgactcagtcgcctggcactctgtcgttgtccccgggggagcgcgctaccctgtcgtgtcgggcgtcgcagtccgtgtcgagctcctacctcgcgtggtaccagcagaagcccggacaggcccctagacttctgatctacggcacttcttcacgcgccaccgggatcagcgacaggttcagcggctccggctccgggaccgacttcaccctgaccattagccggctggagcctgaagatttcgccgtgtattactgccaacactacggaaactcgccgccaaagttcacgttcggacccggaaccaagctggaaatcaag

SEQ ID NO: 170 - DNA, 739 bp, Artificial Sequence
  source: /note="Description of Artificial Sequence: Synthetic polynucleotide"
gaagtccaactggtggagtccgggggagggctcgtgcagcccggaggcagccttcggctgtcgtgcgccgcctccgggttcacgttctcatcctacgcgatgtcgtgggtcagacaggcaccaggaaagggactggaatgggtgtccgccattagcggctccggcggtagcacctactatgccgactcagtgaagggaaggttcactatctcccgcgacaacagcaagaacaccctgtacctccaaatgaactctctgcgggccgaggataccgcggtgtactattgcgccaagatgggttggtccagcggatacttgggagccttcgacatttggggacagggcactactgtgaccgtgtcctccgggggtggcggatcgggaggcggcggctcgggtggagggggttccgaaatcgtgttgacccagtcaccgggaaccctctcgctgtccccgggagaacgggctacactgtcatgtagagcgtcccagtccgtggcttcctcgttcctggcctggtaccagcagaagccgggacaggcaccccgcctgctcatctacggagccagcggccgggcgaccggcatccctgaccgcttctccggttccggctcgggcaccgactttactctgaccattagcaggcttgagcccgaggattttgccgtgtactactgccaacactacggggggagccctcgcctgaccttcggaggcggaactaaggtcgatatcaaaa

SEQ ID NO: 171 - protein, 121 aa, Artificial Sequence
  source: /note="Description of Artificial Sequence: Synthetic polypeptide"
QVQLQESGPGLVKPSETLSLTCTVSGGSISSSYYYWGWIRQPPGKGLEWIGSIYYSGSAYYNPSLKSRVTISVDTSKNQFSLRLSSVTAADTAVYYCARHWQEWPDAFDIWGQGTMVTVSS

SEQ ID NO: 172 - protein, 123 aa, Artificial Sequence
  source: /note="Description of Artificial Sequence: Synthetic polypeptide"
QVNLRESGPALVKPTQTLTLTCTFSGFSLRTSGMCVSWIRQPPGKALEWLARIDWDEDKFYSTSLKTRLTISKDTSDNQVVLRMTNMDPADTATYYCARSGAGGTSATAFDIWGPGTMVTVSS

SEQ ID NO: 173 - protein, 119 aa, Artificial Sequence
  source: /note="Description of Artificial Sequence: Synthetic polypeptide"
EVQLVESGGGLVKPGGSLRLSCAASGFTFSSYSMNWVRQAPGKGLEWVSSISSSSSYIYYADSVKGRFTISRDNAKNSLYLQMNSLRAEDTAVYYCAKTIAAVYAFDIWGQGTTVTVSS

SEQ ID NO: 174 - protein, 117 aa, Artificial Sequence
  source: /note="Description of Artificial Sequence: Synthetic polypeptide"
EVQLVESGGGLVKPGGSLRLSCAASGFTFSDYYMSWIRQAPGKGLEWVSYISSSGSTIYYADSVKGRFTISRDNAKNSLYLQMNSLRAEDTAVYYCARDLRGAFDIWGQGTMVTVSS

SEQ ID NO: 175 - protein, 120 aa, Artificial Sequence
  source: /note="Description of Artificial Sequence: Synthetic polypeptide"
QVQLVQSGAEVKKPGASVKVSCKPSGYTVTSHYIHWVRRAPGQGLEWMGMINPSGGVTAYSQTLQGRVTMTSDTSSSTVYMELSSLRSEDTAMYYCAREGSGSGWYFDFWGRGTLVTVSS

SEQ ID NO: 176 - protein, 123 aa, Artificial Sequence
  source: /note="Description of Artificial Sequence: Synthetic polypeptide"
QVQLQESGPGLVKPSQTLSLTCTVSGGSISSGGYYWSWIRQHPGKGLEWIGYIYYSGSTYYNPSLKSRVTISVDTSKNQFSLKLSSVTAADTAVYYCARAGIAARLRGAFDIWGQGTMVTVSS

SEQ ID NO: 177 - protein, 129 aa, Artificial Sequence
  source: /note="Description of Artificial Sequence: Synthetic polypeptide"
QVQLVQSGAEVKKPGSSVKVSCKASGGTFSSYAISWVRQAPGQGLEWMGGIIPIFGTANYAQKFQGRVTITADESTSTAYMELSSLRSEDTAVYYCARRGGYQLLRWDVGLLRSAFDIWGQGTMVTVSS

SEQ ID NO: 178 - protein, 125 aa, Artificial Sequence
  source: /note="Description of Artificial Sequence: Synthetic polypeptide"
EVQLQQSGPGLVKPSQTLSLTCAISGDSVSSNSAAWNWIRQSPSRGLEWLGRTYYRSKWYSFYAISLKSRIIINPDTSKNQFSLQLKSVTPEDTAVYYCARSSPEGLFLYWFDPWGQGTLVTVSS

SEQ ID NO: 179 - protein, 118 aa, Artificial Sequence
  source: /note="Description of Artificial Sequence: Synthetic polypeptide"
EVQLVESGGGLVQPGGSLRLSCAASGFTFSSYAMSWVRQAPGKGLEWVSAISGSGGSTYYADSVKGRFTISRDNSKNTLYLQMNSLRAEDTAVYYCAKVEGSGSLDYWGQGTLVTVSS

SEQ ID NO: 180 - protein, 118 aa, Artificial Sequence
  source: /note="Description of Artificial Sequence: Synthetic polypeptide"
EVQLVETGGGLVQPGGSLRLSCAASGITFSRYPMSWVRQAPGKGLEWVSGISDSGVSTYYADSAKGRFTISRDNSKNTLFLQMSSLRDEDTAVYYCVTRAGSEASDIWGQGTMVTVSS

SEQ ID NO: 181 - protein, 124 aa, Artificial Sequence
  source: /note="Description of Artificial Sequence: Synthetic polypeptide"
QVQLVESGGGLVQPGGSLRLSCAASGFTFSSYAMSWVRQAPGKGLEWVSAISGSGGSTYYADSVKGRFTISRDNAKNSLYLQMNSLRAEDTAIYYCARATYKRELRYYYGMDVWGQGTMVTVSS

SEQ ID NO: 182 - protein, 124 aa, Artificial Sequence
  source: /note="Description of Artificial Sequence: Synthetic polypeptide"
EVQLVETGGGLVQPGGSLRLSCAASGFTFSSYAMSWVRQAPGKGLEWVSAISGSGGSTYYADSVKGRFTISRDNSKNTLYLQMNTLKAEDTAVYYCARATYKRELRYYYGMDVWGQGTTVTVSS

SEQ ID NO: 183 - protein, 117 aa, Artificial Sequence
  source: /note="Description of Artificial Sequence: Synthetic polypeptide"
EVQLVETGGGLVQPGRSLRLSCAASGFTFDDYAMHWVRQAPGKGLEWVSGISWNSGSIGYADSVKGRFTISRDNAKNSLYLQMNSLRDEDTAVYYCARVGKAVPDVWGQGTTVTVSS

SEQ ID NO: 184 - protein, 122 aa, Artificial Sequence
  source: /note="Description of Artificial Sequence: Synthetic polypeptide"
EVQLVESGGGLVQPGRSLRLSCTASGFTFDDYAMHWVRQRPGKGLEWVASINWKGNSLAYGDSVKGRFAISRDNAKNTVFLQMNSLRTEDTAVYYCASHQGVAYYNYAMDVWGRGTLVTVSS

SEQ ID NO: 185 - protein, 117 aa, Artificial Sequence
  source: /note="Description of Artificial Sequence: Synthetic polypeptide"
EVQLVESGGGLVQPGGSLRLSCAASGFTFSSYAMSWVRQAPGKGLEWVSAISGSGGSTYYADSVKGRFTISRDNSKNTLYLQMNSLRAEDTAVYYCAKVVRDGMDVWGQGTTVTVSS

SEQ ID NO: 186 - protein, 118 aa, Artificial Sequence
  source: /note="Description of Artificial Sequence: Synthetic polypeptide"
EVQLLESGGGLVQPGGSLRLSCAASGFTFSSYAMSWVRQAPGKGLEWVSAISGSGGSTYYADSVKGRFTISRDNSKNTLYLQMNSLRAEDTAVYYCAKIPQTGTFDYWGQGTLVTVSS

SEQ ID NO: 187 - protein, 124 aa, Artificial Sequence
  source: /note="Description of Artificial Sequence: Synthetic polypeptide"
EVQLVETGGGLVQPGGSLRLSCAASGFTFSSYAMSWVRQAPGKGLEWVSAISGSGGSTYYADSVKGRFTMSRENDKNSVFLQMNSLRVEDTGVYYCARANYKRELRYYYGMDVWGQGTMVTVSS

SEQ ID NO: 188 - protein, 120 aa, Artificial Sequence
  source: /note="Description of Artificial Sequence: Synthetic polypeptide"
EVQLLETGGGLVQPGGSLRLSCAASGFSFSSYAMSWVRQAPGKGLEWVSAISGSGGSTYYADSVKGRFTISRDNSKNTLYLQMNSLRAEDTAVYYCAKALVGATGAFDIWGQGTLVTVSS

SEQ ID NO: 189 - protein, 117 aa, Artificial Sequence
  source: /note="Description of Artificial Sequence: Synthetic polypeptide"
EVQLLESGGGLVQPGGSLRLSCAASGFTFSSYAMSWVRQAPGKGLEWVSAISGSGGSTYYADSVKGRFTISRDNSKNTLYLQMNSLRAEDTAVYYCVLWFGEGFDPWGQGTLVTVSS

SEQ ID NO: 190 - protein, 126 aa, Artificial Sequence
  source: /note="Description of Artificial Sequence: Synthetic polypeptide"
QVQLVESGGGLVQPGGSLRLSCAASGFTFSSYAMSWVRQAPGKGLEWVSAISGSGGSTYYADSVKGRFTISRDNSKNTLYLQMNSLRAEDTAVYYCAKVGYDSSGYYRDYYGMDVWGQGTTVTVSS

SEQ ID NO: 191 - protein, 122 aa, Artificial Sequence
  source: /note="Description of Artificial Sequence: Synthetic polypeptide"
EVQLVESGGGLVQPGGSLRLSCAASGFTFSSYAMSWVRQAPGKGLEWVSAISGSGGSTYYADSVKGRFTISRDNSKNTLYLQMNSLRAEDTAVYYCAKMGWSSGYLGAFDIWGQGTTVTVSS

SEQ ID NO: 192 - protein, 107 aa, Artificial Sequence
  source: /note="Description of Artificial Sequence: Synthetic polypeptide"
ETTLTQSPAFMSATPGDKVIISCKASQDIDDAMNWYQQKPGEAPLFIIQSATSPVPGIPPRFSGSGFGTDFSLTINNIESEDAAYYFCLQHDNFPLTFGQGTKLEIK

SEQ ID NO: 193 - protein, 107 aa, Artificial Sequence
  source: /note="Description of Artificial Sequence: Synthetic polypeptide"
DIQMTQSPSSLSASVGDRVTITCRASQDIYNNLAWFQLKPGSAPRSLMYAANKSQSGVPSRFSGSASGTDFTLTISSLQPEDFATYYCQHYYRFPYSFGQGTKLEIK

SEQ ID NO: 194 - protein, 112 aa, Artificial Sequence
  source: /note="Description of Artificial Sequence: Synthetic polypeptide"
EIVLTQSPLSLPVTPEEPASISCRSSQSLLHSNGYNYLDWYLQKPGQSPQLLIYLGSNRASGVPDRFSGSGSGTDFTLKISRVEAEDVGVYYCMQALQTPYTFGQGTKLEIK

SEQ ID NO: 195 - protein, 108 aa, Artificial Sequence
  source: /note="Description of Artificial Sequence: Synthetic polypeptide"
SYVLTQSPSVSAAPGYTATISCGGNNIGTKSVHWYQQKPGQAPLLVIRDDSVRPSKIPGRFSGSNSGNMATLTISGVQAGDEADFYCQVWDSDSEHVVFGGGTKLTVL

SEQ ID NO: 196 - protein, 106 aa, Artificial Sequence
  source: /note="Description of Artificial Sequence: Synthetic polypeptide"
SYVLTQPPSVSVSPGQTASITCSGDGLSKKYVSWYQQKAGQSPVVLISRDKERPSGIPDRFSGSNSADTATLTISGTQAMDEADYYCQAWDDTTVVFGGGTKLTVL

SEQ ID NO: 197 - protein, 107 aa, Artificial Sequence
  source: /note="Description of Artificial Sequence: Synthetic polypeptide"
DIVMTQSPSSVSASVGDRVIITCRASQGIRNWLAWYQQKPGKAPNLLIYAASNLQSGVPSRFSGSGSGADFTLTISSLQPEDVATYYCQKYNSAPFTFGPGTKVDIK

SEQ ID NO: 198 - protein, 109 aa, Artificial Sequence
  source: /note="Description of Artificial Sequence: Synthetic polypeptide"
SYVLTQPPSVSVAPGQTARITCGGNNIGSKSVHWYQQKPGQAPVLVLYGKNNRPSGVPDRFSGSRSGTTASLTITGAQAEDEADYYCSSRDSSGDHLRVFGTGTKVTVL

SEQ ID NO: 199 - protein, 108 aa, Artificial Sequence
  source: /note="Description of Artificial Sequence: Synthetic polypeptide"
SSELTQDPAVSVALGQTIRITCQGDSLGNYYATWYQQKPGQAPVLVIYGTNNRPSGIPDRFSASSSGNTASLTITGAQAEDEADYYCNSRDSSGHHLLFGTGTKVTVL

SEQ ID NO: 200 - protein, 113 aa, Artificial Sequence
  source: /note="Description of Artificial Sequence: Synthetic polypeptide"
EIVMTQSPGTLSLSPGERATLSCRASQSVSSAYLAWYQQKPGQPPRLLISGASTRATGIPDRFGGSGSGTDFTLTISRLEPEDFAVYYCQHYGSSFNGSSLFTFGQGTRLEIK

SEQ ID NO: 201 - protein, 108 aa, Artificial Sequence
  source: /note="Description of Artificial Sequence: Synthetic polypeptide"
EIVLTQSPATLSLSPGERATLSCRASQSVSNSLAWYQQKPGQAPRLLIYDASSRATGIPDRFSGSGSGTDFTLTISRLEPEDFAIYYCQQFGTSSGLTFGGGTKLEIK

SEQ ID NO: 202 - protein, 109 aa, Artificial Sequence
  source: /note="Description of Artificial Sequence: Synthetic polypeptide"
EIVMTQSPGTVSLSPGERATLSCRASQSVSSSFLAWYQQKPGQAPRLLIYGASSRATGIPDRFSGSGSGTDFTLTISRLEPEDSAVYYCQQYHSSPSWTFGQGTRLEIK

SEQ ID NO: 203 - protein, 109 aa, Artificial Sequence
  source: /note="Description of Artificial Sequence: Synthetic polypeptide"
EIVLTQSPSTLSLSPGESATLSCRASQSVSTTFLAWYQQKPGQAPRLLIYGSSNRATGIPDRFSGSGSGTDFTLTIRRLEPEDFAVYYCQQYHSSPSWTFGQGTKVEIK

SEQ ID NO: 204 - protein, 107 aa, Artificial Sequence
  source: /note="Description of Artificial Sequence: Synthetic polypeptide"
DIVMTQTPSSLSASVGDRVTITCRASQSISSYLNWYQQKPGKAPKLLIYAASSLQSGVPSRFSGSGSGTDFTLTISSLQPEDFATYYCQQSYSTPYSFGQGTRLEIK

SEQ ID NO: 205 - protein, 109 aa, Artificial Sequence
  source: /note="Description of Artificial Sequence: Synthetic polypeptide"
EIVLTQSPGTLSLSPGERATLSCRATQSIGSSFLAWYQQRPGQAPRLLIYGASQRATGIPDRFSGRGSGTDFTLTISRVEPEDSAVYYCQHYESSPSWTFGQGTKVEIK

SEQ ID NO: 206 - protein, 109 aa, Artificial Sequence
  source: /note="Description of Artificial Sequence: Synthetic polypeptide"
EIVLTQSPATLSLSPGERATLSCRASQSVSSSYLAWYQQKPGQAPRLLIYGASSRATGIPDRFSGNGSGTDFTLTISRLEPEDFAVYYCQQYGSPPRFTFGPGTKVDIK

SEQ ID NO: 207 - protein, 109 aa, Artificial Sequence
  source: /note="Description of Artificial Sequence: Synthetic polypeptide"
EIVLTQSPGTLSLSPGERATLSCRASQSVSSSYLAWYQQRPGQAPRLLIYGASSRATGIPDRFSGSGSGTDFTLTISRLEPEDFAVYYCQHYGSSPSWTFGQGTRLEIK

SEQ ID NO: 208 - protein, 109 aa, Artificial Sequence
  source: /note="Description of Artificial Sequence: Synthetic polypeptide"
EIVMTQSPGTLSLSPGESATLSCRASQRVASNYLAWYQHKPGQAPSLLISGASSRATGVPDRFSGSGSGTDFTLAISRLEPEDSAVYYCQHYDSSPSWTFGQGTKVEIK

SEQ ID NO: 209 - protein, 109 aa, Artificial Sequence
  source: /note="Description of Artificial Sequence: Synthetic polypeptide"
EIVLTQSPGTLSLSPGERATLSCRASQSLSSNFLAWYQQKPGQAPGLLIYGASNWATGTPDRFSGSGSGTDFTLTITRLEPEDFAVYYCQYYGTSPMYTFGQGTKVEIK

SEQ ID NO: 210 - protein, 112 aa, Artificial Sequence
  source: /note="Description of Artificial Sequence: Synthetic polypeptide"
DIVLTQSPLSLPVTPGEPASISCRSSQSLLHSNGYNYLDWYLQKPGQSPQLLIYLGSNRASGVPDRFSGSGSGTDFTLKISRVEAEDVGVYYCMQALQTPLTFGGGTKVDIK

SEQ ID NO: 211 - protein, 110 aa, Artificial Sequence
  source: /note="Description of Artificial Sequence: Synthetic polypeptide"
EIVLTQSPGTLSLSPGERATLSCRASQSVSSSYLAWYQQKPGQAPRLLIYGTSSRATGISDRFSGSGSGTDFTLTISRLEPEDFAVYYCQHYGNSPPKFTFGPGTKLEIK

SEQ ID NO: 212 - protein, 109 aa, Artificial Sequence
  source: /note="Description of Artificial Sequence: Synthetic polypeptide"
EIVLTQSPGTLSLSPGERATLSCRASQSVASSFLAWYQQKPGQAPRLLIYGASGRATGIPDRFSGSGSGTDFTLTISRLEPEDFAVYYCQHYGGSPRLTFGGGTKVDIK

SEQ ID NO: 213 - protein, 487 aa, Artificial Sequence
  source: /note="Description of Artificial Sequence: Synthetic polypeptide"
MALPVTALLLPLALLLHAARPQVQLQESGPGLVKPSETLSLTCTVSGGSISSSYYYWGWIRQPPGKGLEWIGSIYYSGSAYYNPSLKSRVTISVDTSKNQFSLRLSSVTAADTAVYYCARHWQEWPDAFDIWGQGTMVTVSSGGGGSGGGGSGGGGSETTLTQSPAFMSATPGDKVIISCKASQDIDDAMNWYQQKPGEAPLFIIQSATSPVPGIPPRFSGSGFGTDFSLTINNIESEDAAYYFCLQHDNFPLTFGQGTKLEIKTTTPAPRPPTPAPTIASQPLSLRPEACRPAAGGAVHTRGLDFACDIYIWAPLAGTCGVLLLSLVITLYCKRGRKKLLYIFKQPFMRPVQTTQEEDGCSCRFPEEEEGGCELRVKFSRSADAPAYKQGQNQLYNELNLGRREEYDVLDKRRGRDPEMGGKPRRKNPQEGLYNELQKDKMAEAYSEIGMKGERRRGKGHDGLYQGLSTATKDTYDALHMQALPPR

SEQ ID NO: 214 - protein, 489 aa, Artificial Sequence
  source: /note="Description of Artificial Sequence: Synthetic polypeptide"
MALPVTALLLPLALLLHAARPQVNLRESGPALVKPTQTLTLTCTFSGFSLRTSGMCVSWIRQPPGKALEWLARIDWDEDKFYSTSLKTRLTISKDTSDNQVVLRMTNMDPADTATYYCARSGAGGTSATAFDIWGPGTMVTVSSGGGGSGGGGSGGGGSDIQMTQSPSSLSASVGDRVTITCRASQDIYNNLAWFQLKPGSAPRSLMYAANKSQSGVPSRFSGSASGTDFTLTISSLQPEDFATYYCQHYYRFPYSFGQGTKLEIKTTTPAPRPPTPAPTIASQPLSLRPEACRPAAGGAVHTRGLDFACDIYIWAPLAGTCGVLLLSLVITLYCKRGRKKLLYIFKQPFMRPVQTTQEEDGCSCRFPEEEEGGCELRVKFSRSADAPAYKQGQNQLYNELNLGRREEYDVLDKRRGRDPEMGGKPRRKNPQEGLYNELQKDKMAEAYSEIGMKGERRRGKGHDGLYQGLSTATKDTYDALHMQALPPR

SEQ ID NO: 215 - protein, 490 aa, Artificial Sequence
  source: /note="Description of Artificial Sequence: Synthetic polypeptide"
MALPVTALLLPLALLLHAARPEVQLVESGGGLVKPGGSLRLSCAASGFTFSSYSMNWVRQAPGKGLEWVSSISSSSSYIYYADSVKGRFTISRDNAKNSLYLQMNSLRAEDTAVYYCAKTIAAVYAFDIWGQGTTVTVSSGGGGSGGGGSGGGGSEIVLTQSPLSLPVTPEEPASISCRSSQSLLHSNGYNYLDWYLQKPGQSPQLLIYLGSNRASGVPDRFSGSGSGTDFTLKISRVEAEDVGVYYCMQALQTPYTFGQGTKLEIKTTTPAPRPPTPAPTIASQPLSLRPEACRPAAGGAVHTRGLDFACDIYIWAPLAGTCGVLLLSLVITLYCKRGRKKLLYIFKQPFMRPVQTTQEEDGCSCRFPEEEEGGCELRVKFSRSADAPAYKQGQNQLYNELNLGRREEYDVLDKRRGRDPEMGGKPRRKNPQEGLYNELQKDKMAEAYSEIGMKGERRRGKGHDGLYQGLSTATKDTYDALHMQALPPR

SEQ ID NO: 216 - protein, 484 aa, Artificial Sequence
  source: /note="Description of Artificial Sequence: Synthetic polypeptide"
MALPVTALLLPLALLLHAARPEVQLVESGGGLVKPGGSLRLSCAASGFTFSDYYMSWIRQAPGKGLEWVSYISSSGSTIYYADSVKGRFTISRDNAKNSLYLQMNSLRAEDTAVYYCARDLRGAFDIWGQGTMVTVSSGGGGSGGGGSGGGGSSYVLTQSPSVSAAPGYTATISCGGNNIGTKSVHWYQQKPGQAPLLVIRDDSVRPSKIPGRFSGSNSGNMATLTISGVQAGDEADFYCQVWDSDSEHVVFGGGTKLTVLTTTPAPRPPTPAPTIASQPLSLRPEACRPAAGGAVHTRGLDFACDIYIWAPLAGTCGVLLLSLVITLYCKRGRKKLLYIFKQPFMRPVQTTQEEDGCSCRFPEEEEGGCELRVKFSRSADAPAYKQGQNQLYNELNLGRREEYDVLDKRRGRDPEMGGKPRRKNPQEGLYNELQKDKMAEAYSEIGMKGERRRGKGHDGLYQGLSTATKDTYDALHMQALPPR

SEQ ID NO: 217 - protein, 485 aa, Artificial Sequence
  source: /note="Description of Artificial Sequence: Synthetic polypeptide"
MALPVTALLLPLALLLHAARPQVQLVQSGAEVKKPGASVKVSCKPSGYTVTSHYIHWVRRAPGQGLEWMGMINPSGGVTAYSQTLQGRVTMTSDTSSSTVYMELSSLRSEDTAMYYCAREGSGSGWYFDFWGRGTLVTVSSGGGGSGGGGSGGGGSSYVLTQPPSVSVSPGQTASITCSGDGLSKKYVSWYQQKAGQSPVVLISRDKERPSGIPDRFSGSNSADTATLTISGTQAMDEADYYCQAWDDTTVVFGGGTKLTVLTTTPAPRPPTPAPTIASQPLSLRPEACRPAAGGAVHTRGLDFACDIYIWAPLAGTCGVLLLSLVITLYCKRGRKKLLYIFKQPFMRPVQTTQEEDGCSCRFPEEEEGGCELRVKFSRSADAPAYKQGQNQLYNELNLGRREEYDVLDKRRGRDPEMGGKPRRKNPQEGLYNELQKDKMAEAYSEIGMKGERRRGKGHDGLYQGLSTATKDTYDALHMQALPPR

SEQ ID NO: 218 - protein, 489 aa, Artificial Sequence
  source: /note="Description of Artificial Sequence: Synthetic polypeptide"
MALPVTALLLPLALLLHAARPQVQLQESGPGLVKPSQTLSLTCTVSGGSISSGGYYWSWIRQHPGKGLEWIGYIYYSGSTYYNPSLKSRVTISVDTSKNQFSLKLSSVTAADTAVYYCARAGIAARLRGAFDIWGQGTMVTVSSGGGGSGGGGSGGGGSDIVMTQSPSSVSASVGDRVIITCRASQGIRNWLAWYQQKPGKAPNLLIYAASNLQSGVPSRFSGSGSGADFTLTISSLQPEDVATYYCQKYNSAPFTFGPGTKVDIKTTTPAPRPPTPAPTIASQPLSLRPEACRPAAGGAVHTRGLDFACDIYIWAPLAGTCGVLLLSLVITLYCKRGRKKLLYIFKQPFMRPVQTTQEEDGCSCRFPEEEEGGCELRVKFSRSADAPAYKQGQNQLYNELNLGRREEYDVLDKRRGRDPEMGGKPRRKNPQEGLYNELQKDKMAEAYSEIGMKGERRRGKGHDGLYQGLSTATKDTYDALHMQALPPR

SEQ ID NO: 219 - protein, 497 aa, Artificial Sequence
  source: /note="Description of Artificial Sequence: Synthetic polypeptide"
MALPVTALLLPLALLLHAARPQVQLVQSGAEVKKPGSSVKVSCKASGGTFSSYAISWVRQAPGQGLEWMGGIIPIFGTANYAQKFQGRVTITADESTSTAYMELSSLRSEDTAVYYCARRGGYQLLRWDVGLLRSAFDIWGQGTMVTVSSGGGGSGGGGSGGGGSSYVLTQPPSVSVAPGQTARITCGGNNIGSKSVHWYQQKPGQAPVLVLYGKNNRPSGVPDRFSGSRSGTTASLTITGAQAEDEADYYCSSRDSSGDHLRVFGTGTKVTVLTTTPAPRPPTPAPTIASQPLSLRPEACRPAAGGAVHTRGLDFACDIYIWAPLAGTCGVLLLSLVITLYCKRGRKKLLYIFKQPFMRPVQTTQEEDGCSCRFPEEEEGGCELRVKFSRSADAPAYKQGQNQLYNELNLGRREEYDVLDKRRGRDPEMGGKPRRKNPQEGLYNELQKDKMAEAYSEIGMKGERRRGKGHDGLYQGLSTATKDTYDALHMQALPPR

SEQ ID NO: 220 - protein, 492 aa, Artificial Sequence
  source: /note="Description of Artificial Sequence: Synthetic polypeptide"
MALPVTALLLPLALLLHAARPEVQLQQSGPGLVKPSQTLSLTCAISGDSVSSNSAAWNWIRQSPSRGLEWLGRTYYRSKWYSFYAISLKSRIIINPDTSKNQFSLQLKSVTPEDTAVYYCARSSPEGLFLYWFDPWGQGTLVTVSSGGDGSGGGGSGGGGSSSELTQDPAVSVALGQTIRITCQGDSLGNYYATWYQQKPGQAPVLVIYGTNNRPSGIPDRFSASSSGNTASLTITGAQAEDEADYYCNSRDSSGHHLLFGTGTKVTVLTTTPAPRPPTPAPTIASQPLSLRPEACRPAAGGAVHTRGLDFACDIYIWAPLAGTCGVLLLSLVITLYCKRGRKKLLYIFKQPFMRPVQTTQEEDGCSCRFPEEEEGGCELRVKFSRSADAPAYKQGQNQLYNELNLGRREEYDVLDKRRGRDPEMGGKPRRKNPQEGLYNELQKDKMAEAYSEIGMKGERRRGKGHDGLYQGLSTATKDTYDALHMQALPPR

SEQ ID NO: 221 - protein, 490 aa, Artificial Sequence
  source: /note="Description of Artificial Sequence: Synthetic polypeptide"
MALPVTALLLPLALLLHAARPEVQLVESGGGLVQPGGSLRLSCAASGFTFSSYAMSWVRQAPGKGLEWVSAISGSGGSTYYADSVKGRFTISRDNSKNTLYLQMNSLRAEDTAVYYCAKVEGSGSLDYWGQGTLVTVSSGGGGSGGGGSGGGGSEIVMTQSPGTLSLSPGERATLSCRASQSVSSAYLAWYQQKPGQPPRLLISGASTRATGIPDRFGGSGSGTDFTLTISRLEPEDFAVYYCQHYGSSFNGSSLFTFGQGTRLEIKTTTPAPRPPTPAPTIASQPLSLRPEACRPAAGGAVHTRGLDFACDIYIWAPLAGTCGVLLLSLVITLYCKRGRKKLLYIFKQPFMRPVQTTQEEDGCSCRFPEEEEGGCELRVKFSRSADAPAYKQGQNQLYNELNLGRREEYDVLDKRRGRDPEMGGKPRRKNPQEGLYNELQKDKMAEAYSEIGMKGERRRGKGHDGLYQGLSTATKDTYDALHMQALPPR

SEQ ID NO: 222 - protein, 485 aa, Artificial Sequence
  source: /note="Description of Artificial Sequence: Synthetic polypeptide"
MALPVTALLLPLALLLHAARPEVQLVETGGGLVQPGGSLRLSCAASGITFSRYPMSWVRQAPGKGLEWVSGISDSGVSTYYADSAKGRFTISRDNSKNTLFLQMSSLRDEDTAVYYCVTRAGSEASDIWGQGTMVTVSSGGGGSGGGGSGGGGSEIVLTQSPATLSLSPGERATLSCRASQSVSNSLAWYQQKPGQAPRLLIYDASSRATGIPDRFSGSGSGTDFTLTISRLEPEDFAIYYCQQFGTSSGLTFGGGTKLEIKTTTPAPRPPTPAPTIASQPLSLRPEACRPAAGGAVHTRGLDFACDIYIWAPLAGTCGVLLLSLVITLYCKRGRKKLLYIFKQPFMRPVQTTQEEDGCSCRFPEEEEGGCELRVKFSRSADAPAYKQGQNQLYNELNLGRREEYDVLDKRRGRDPEMGGKPRRKNPQEGLYNELQKDKMAEAYSEIGMKGERRRGKGHDGLYQGLSTATKDTYDALHMQALPPR

SEQ ID NO: 223 - protein, 492 aa, Artificial Sequence
  source: /note="Description of Artificial Sequence: Synthetic polypeptide"
MALPVTALLLPLALLLHAARPQVQLVESGGGLVQPGGSLRLSCAASGFTFSSYAMSWVRQAPGKGLEWVSAISGSGGSTYYADSVKGRFTISRDNAKNSLYLQMNSLRAEDTAIYYCARATYKRELRYYYGMDVWGQGTMVTVSSGGGGSGGGGSGGGGSEIVMTQSPGTVSLSPGERATLSCRASQSVSSSFLAWYQQKPGQAPRLLIYGASSRATGIPDRFSGSGSGTDFTLTISRLEPEDSAVYYCQQYHSSPSWTFGQGTRLEIKTTTPAPRPPTPAPTIASQPLSLRPEACRPAAGGAVHTRGLDFACDIYIWAPLAGTCGVLLLSLVITLYCKRGRKKLLYIFKQPFMRPVQTTQEEDGCSCRFPEEEEGGCELRVKFSRSADAPAYKQGQNQLYNELNLGRREEYDVLDKRRGRDPEMGGKPRRKNPQEGLYNELQKDKMAEAYSEIGMKGERRRGKGHDGLYQGLSTATKDTYDALHMQALPPR

SEQ ID NO: 224 - protein, 492 aa, Artificial Sequence
  source: /note="Description of Artificial Sequence: Synthetic polypeptide"
MALPVTALLLPLALLLHAARPEVQLVETGGGLVQPGGSLRLSCAASGFTFSSYAMSWVRQAPGKGLEWVSAISGSGGSTYYADSVKGRFTISRDNSKNTLYLQMNTLKAEDTAVYYCARATYKRELRYYYGMDVWGQGTTVTVSSGGGGSGGGGSGGGGSEIVLTQSPSTLSLSPGESATLSCRASQSVSTTFLAWYQQKPGQAPRLLIYGSSNRATGIPDRFSGSGSGTDFTLTIRRLEPEDFAVYYCQQYHSSPSWTFGQGTKVEIKTTTPAPRPPTPAPTIASQPLSLRPEACRPAAGGAVHTRGLDFACDIYIWAPLAGTCGVLLLSLVITLYCKRGRKKLLYIFKQPFMRPVQTTQEEDGCSCRFPEEEEGGCELRVKFSRSADAPAYKQGQNQLYNELNLGRREEYDVLDKRRGRDPEMGGKPRRKNPQEGLYNELQKDKMAEAYSEIGMKGERRRGKGHDGLYQGLSTATKDTYDALHMQALPPR

SEQ ID NO: 225 - protein, 483 aa, Artificial Sequence
  source: /note="Description of Artificial Sequence: Synthetic polypeptide"
MALPVTALLLPLALLLHAARPEVQLVETGGGLVQPGRSLRLSCAASGFTFDDYAMHWVRQAPGKGLEWVSGISWNSGSIGYADSVKGRFTISRDNAKNSLYLQMNSLRDEDTAVYYCARVGKAVPDVWGQGTTVTVSSGGGGSGGGGSGGGGSDIVMTQTPSSLSASVGDRVTITCRASQSISSYLNWYQQKPGKAPKLLIYAASSLQSGVPSRFSGSGSGTDFTLTISSLQPEDFATYYCQQSYSTPYSFGQGTRLEIKTTTPAPRPPTPAPTIASQPLSLRPEACRPAAGGAVHTRGLDFACDIYIWAPLAGTCGVLLLSLVITLYCKRGRKKLLYIFKQPFMRPVQTTQEEDGCSCRFPEEEEGGCELRVKFSRSADAPAYKQGQNQLYNELNLGRREEYDVLDKRRGRDPEMGGKPRRKNPQEGLYNELQKDKMAEAYSEIGMKGERRRGKGHDGLYQGLSTATKDTYDALHMQALPPR

SEQ ID NO: 226 - protein, 490 aa, Artificial Sequence
  source: /note="Description of Artificial Sequence: Synthetic polypeptide"
MALPVTALLLPLALLLHAARPEVQLVESGGGLVQPGRSLRLSCTASGFTFDDYAMHWVRQRPGKGLEWVASINWKGNSLAYGDSVKGRFAISRDNAKNTVFLQMNSLRTEDTAVYYCASHQGVAYYNYAMDVWGRGTLVTVSSGGGGSGGGGSGGGGSEIVLTQSPGTLSLSPGERATLSCRATQSIGSSFLAWYQQRPGQAPRLLIYGASQRATGIPDRFSGRGSGTDFTLTISRVEPEDSAVYYCQHYESSPSWTFGQGTKVEIKTTTPAPRPPTPAPTIASQPLSLRPEACRPAAGGAVHTRGLDFACDIYIWAPLAGTCGVLLLSLVITLYCKRGRKKLLYIFKQPFMRPVQTTQEEDGCSCRFPEEEEGGCELRVKFSRSADAPAYKQGQNQLYNELNLGRREEYDVLDKRRGRDPEMGGKPRRKNPQEGLYNELQKDKMAEAYSEIGMKGERRRGKGHDGLYQGLSTATKDTYDALHMQALPPR

SEQ ID NO: 227 - protein, 485 aa, Artificial Sequence
  source: /note="Description of Artificial Sequence: Synthetic polypeptide"
MALPVTALLLPLALLLHAARPEVQLVESGGGLVQPGGSLRLSCAASGFTFSSYAMSWVRQAPGKGLEWVSAISGSGGSTYYADSVKGRFTISRDNSKNTLYLQMNSLRAEDTAVYYCAKVVRDGMDVWGQGTTVTVSSGGGGSGGGGSGGGGSEIVLTQSPATLSLSPGERATLSCRASQSVSSSYLAWYQQKPGQAPRLLIYGASSRATGIPDRFSGNGSGTDFTLTISRLEPEDFAVYYCQQYGSPPRFTFGPGTKVDIKTTTPAPRPPTPAPTIASQPLSLRPEACRPAAGGAVHTRGLDFACDIYIWAPLAGTCGVLLLSLVITLYCKRGRKKLLYIFKQPFMRPVQTTQEEDGCSCRFPEEEEGGCELRVKFSRSADAPAYKQGQNQLYNELNLGRREEYDVLDKRRGRDPEMGGKPRRKNPQEGLYNELQKDKMAEAYSEIGMKGERRRGKGHDGLYQGLSTATKDTYDALHMQALPPR

SEQ ID NO: 228 - protein, 486 aa, Artificial Sequence
  source: /note="Description of Artificial Sequence: Synthetic polypeptide"
MALPVTALLLPLALLLHAARPEVQLLESGGGLVQPGGSLRLSCAASGFTFSSYAMSWVRQAPGKGLEWVSAISGSGGSTYYADSVKGRFTISRDNSKNTLYLQMNSLRAEDTAVYYCAKIPQTGTFDYWGQGTLVTVSSGGGGSGGGGSGGGGSEIVLTQSPGTLSLSPGERATLSCRASQSVSSSYLAWYQQRPGQAPRLLIYGASSRATGIPDRFSGSGSGTDFTLTISRLEPEDFAVYYCQHYGSSPSWTFGQGTRLEIKTTTPAPRPPTPAPTIASQPLSLRPEACRPAAGGAVHTRGLDFACDIYIWAPLAGTCGVLLLSLVITLYCKRGRKKLLYIFKQPFMRPVQTTQEEDGCSCRFPEEEEGGCELRVKFSRSADAPAYKQGQNQLYNELNLGRREEYDVLDKRRGRDPEMGGKPRRKNPQEGLYNELQKDKMAEAYSEIGMKGERRRGKGHDGLYQGLSTATKDTYDALHMQALPPR

SEQ ID NO: 229 - protein, 492 aa, Artificial Sequence
  source: /note="Description of Artificial Sequence: Synthetic polypeptide"
MALPVTALLLPLALLLHAARPEVQLVETGGGLVQPGGSLRLSCAASGFTFSSYAMSWVRQAPGKGLEWVSAISGSGGSTYYADSVKGRFTMSRENDKNSVFLQMNSLRVEDTGVYYCARANYKRELRYYYGMDVWGQGTMVTVSSGGGGSGGGGSGGGGSEIVMTQSPGTLSLSPGESATLSCRASQRVASNYLAWYQHKPGQAPSLLISGASSRATGVPDRFSGSGSGTDFTLAISRLEPEDSAVYYCQHYDSSPSWTFGQGTKVEIKTTTPAPRPPTPAPTIASQPLSLRPEACRPAAGGAVHTRGLDFACDIYIWAPLAGTCGVLLLSLVITLYCKRGRKKLLYIFKQPFMRPVQTTQEEDGCSCRFPEEEEGGCELRVKFSRSADAPAYKQGQNQLYNELNLGRREEYDVLDKRRGRDPEMGGKPRRKNPQEGLYNELQKDKMAEAYSEIGMKGERRRGKGHDGLYQGLSTATKDTYDALHMQALPPR

SEQ ID NO: 230 - protein, 488 aa, Artificial Sequence
  source: /note="Description of Artificial Sequence: Synthetic polypeptide"
MALPVTALLLPLALLLHAARPEVQLLETGGGLVQPGGSLRLSCAASGFSFSSYAMSWVRQAPGKGLEWVSAISGSGGSTYYADSVKGRFTISRDNSKNTLYLQMNSLRAEDTAVYYCAKALVGATGAFDIWGQGTLVTVSSGGGGSGGGGSGGGGSEIVLTQSPGTLSLSPGERATLSCRASQSLSSNFLAWYQQKPGQAPGLLIYGASNWATGTPDRFSGSGSGTDFTLTITRLEPEDFAVYYCQYYGTSPMYTFGQGTKVEIKTTTPAPRPPTPAPTIASQPLSLRPEACRPAAGGAVHTRGLDFACDIYIWAPLAGTCGVLLLSLVITLYCKRGRKKLLYIFKQPFMRPVQTTQEEDGCSCRFPEEEEGGCELRVKFSRSADAPAYKQGQNQLYNELNLGRREEYDVLDKRRGRDPEMGGKPRRKNPQEGLYNELQKDKMAEAYSEIGMKGERRRGKGHDGLYQGLSTATKDTYDALHMQALPPR

SEQ ID NO: 231 - protein, 488 aa, Artificial Sequence
  source: /note="Description of Artificial Sequence: Synthetic polypeptide"
MALPVTALLLPLALLLHAARPEVQLLESGGGLVQPGGSLRLSCAASGFTFSSYAMSWVRQAPGKGLEWVSAISGSGGSTYYADSVKGRFTISRDNSKNTLYLQMNSLRAEDTAVYYCVLWFGEGFDPWGQGTLVTVSSGGGGSGGGGSGGGGSDIVLTQSPLSLPVTPGEPASISCRSSQSLLHSNGYNYLDWYLQKPGQSPQLLIYLGSNRASGVPDRFSGSGSGTDFTLKISRVEAEDVGVYYCMQALQTPLTFGGGTKVDIKTTTPAPRPPTPAPTIASQPLSLRPEACRPAAGGAVHTRGLDFACDIYIWAPLAGTCGVLLLSLVITLYCKRGRKKLLYIFKQPFMRPVQTTQEEDGCSCRFPEEEEGGCELRVKFSRSADAPAYKQGQNQLYNELNLGRREEYDVLDKRRGRDPEMGGKPRRKNPQEGLYNELQKDKMAEAYSEIGMKGERRRGKGHDGLYQGLSTATKDTYDALHMQALPPR

SEQ ID NO: 232 - protein, 495 aa, Artificial Sequence
  source: /note="Description of Artificial Sequence: Synthetic polypeptide"
MALPVTALLLPLALLLHAARPQVQLVESGGGLVQPGGSLRLSCAASGFTFSSYAMSWVRQAPGKGLEWVSAISGSGGSTYYADSVKGRFTISRDNSKNTLYLQMNSLRAEDTAVYYCAKVGYDSSGYYRDYYGMDVWGQGTTVTVSSGGGGSGGGGSGGGGSEIVLTQSPGTLSLSPGERATLSCRASQSVSSSYLAWYQQKPGQAPRLLIYGTSSRATGISDRFSGSGSGTDFTLTISRLEPEDFAVYYCQHYGNSPPKFTFGPGTKLEIKTTTPAPRPPTPAPTIASQPLSLRPEACRPAAGGAVHTRGLDFACDIYIWAPLAGTCGVLLLSLVITLYCKRGRKKLLYIFKQPFMRPVQTTQEEDGCSCRFPEEEEGGCELRVKFSRSADAPAYKQGQNQLYNELNLGRREEYDVLDKRRGRDPEMGGKPRRKNPQEGLYNELQKDKMAEAYSEIGMKGERRRGKGHDGLYQGLSTATKDTYDALHMQALPPR

SEQ ID NO: 233 - protein, 490 aa, Artificial Sequence
  source: /note="Description of Artificial Sequence: Synthetic polypeptide"
MALPVTALLLPLALLLHAARPEVQLVESGGGLVQPGGSLRLSCAASGFTFSSYAMSWVRQAPGKGLEWVSAISGSGGSTYYADSVKGRFTISRDNSKNTLYLQMNSLRAEDTAVYYCAKMGWSSGYLGAFDIWGQGTTVTVSSGGGGSGGGGSGGGGSEIVLTQSPGTLSLSPGERATLSCRASQSVASSFLAWYQQKPGQAPRLLIYGASGRATGIPDRFSGSGSGTDFTLTISRLEPEDFAVYYCQHYGGSPRLTFGGGTKVDIKTTTPAPRPPTPAPTIASQPLSLRPEACRPAAGGAVHTRGLDFACDIYIWAPLAGTCGVLLLSLVITLYCKRGRKKLLYIFKQPFMRPVQTTQEEDGCSCRFPEEEEGGCELRVKFSRSADAPAYKQGQNQLYNELNLGRREEYDVLDKRRGRDPEMGGKPRRKNPQEGLYNELQKDKMAEAYSEIGMKGERRRGKGHDGLYQGLSTATKDTYDALHMQALPPR

SEQ ID NO: 234 - DNA, 1461 bp, Artificial Sequence
  source: /note="Description of Artificial Sequence: Synthetic polynucleotide"
atggccctccctgtcaccgccctgctgcttccgctggctcttctgctccacgccgctcggccccaagtgcagcttcaggaaagcggaccgggcctggtcaagccatccgaaactctctccctgacttgcactgtgtctggcggttccatctcatcgtcgtactactactggggctggattaggcagccgcccggaaagggactggagtggatcggaagcatctactattccggctcggcgtactacaaccctagcctcaagtcgagagtgaccatctccgtggatacctccaagaaccagttttccctgcgcctgagctccgtgaccgccgctgacaccgccgtgtactactgtgctcggcattggcaggaatggcccgatgccttcgacatttggggccagggcactatggtcactgtgtcatccgggggtggaggcagcgggggaggagggtccggggggggaggttcagagacaaccttgacccagtcacccgcattcatgtccgccactccgggagacaaggtcatcatctcgtgcaaagcgtcccaggatatcgacgatgccatgaattggtaccagcagaagcctggcgaagcgccgctgttcattatccaatccgcaacctcgcccgtgcctggaatcccaccgcggttcagcggcagcggtttcggaaccgacttttccctgaccattaacaacattgagtccgaggacgccgcctactacttctgcctgcaacacgacaacttccctctcacgttcggccagggaaccaagctggaaatcaagaccactaccccagcaccgaggccacccaccccggctcctaccatcgcctcccagcctctgtccctgcgtccggaggcatgtagacccgcagctggtggggccgtgcatacccggggtcttgacttcgcctgcgatatctacatttgggcccctctggctggtacttgcggggtcctgctgctttcactcgtgatcactctttactgtaagcgcggtcggaagaagctgctgtacatctttaagcaacccttcatgaggcctgtgcagactactcaagaggaggacggctgttcatgccggttcccagaggaggaggaaggcggctgcgaactgcgcgtgaaattcagccgcagcgcagatgctccagcctacaagcaggggcagaaccagctctacaacgaactcaatcttggtcggagagaggagtacgacgtgctggacaagcggagaggacgggacccagaaatgggcgggaagccgcgcagaaagaatccccaagagggcctgtacaacgagctccaaaaggataagatggcagaagcctatagcgagattggtatgaaaggggaacgcagaagaggcaaaggccacgacggactgtaccagggactcagcaccgccaccaaggacacctatgacgctcttcacatgcaggccctgccgcctcgg

SEQ ID NO: 235 - DNA, 1467 bp, Artificial Sequence
  source: /note="Description of Artificial Sequence: Synthetic polynucleotide"
atggccctccctgtcaccgccctgctgcttccgctggctcttctgctccacgccgctcggccccaagtcaatctgcgcgaatccggccccgccttggtcaagcctacccagaccctcactctgacctgtactttctccggcttctccctgcggacttccgggatgtgcgtgtcctggatcagacagcctccgggaaaggccctggagtggctcgctcgcattgactgggatgaggacaagttctactccacctcactcaagaccaggctgaccatcagcaaagatacctctgacaaccaagtggtgctccgcatgaccaacatggacccagccgacactgccacttactactgcgcgaggagcggagcgggcggaacctccgccaccgccttcgatatttggggcccgggtaccatggtcaccgtgtcaagcggaggaggggggtccgggggcggcggttccgggggaggcggatcggacattcagatgactcagtcaccatcgtccctgagcgctagcgtgggcgacagagtgacaatcacttgccgggcatcccaggacatctataacaaccttgcgtggttccagctgaagcctggttccgcaccgcggtcacttatgtacgccgccaacaagagccagtcgggagtgccgtcccggttttccggttcggcctcgggaactgacttcaccctgacgatctccagcctgcaacccgaggatttcgccacctactactgccagcactactaccgctttccctactcgttcggacagggaaccaagctggaaatcaagaccactaccccagcaccgaggccacccaccccggctcctaccatcgcctcccagcctctgtccctgcgtccggaggcatgtagacccgcagctggtggggccgtgcatacccggggtcttgacttcgcctgcgatatctacatttgggcccctctggctggtacttgcggggtcctgctgctttcactcgtgatcactctttactgtaagcgcggtcggaagaagctgctgtacatctttaagcaacccttcatgaggcctgtgcagactactcaagaggaggacggctgttcatgccggttcccagaggaggaggaaggcggctgcgaactgcgcgtgaaattcagccgcagcgcagatgctccagcctacaagcaggggcagaaccagctctacaacgaactcaatcttggtcggagagaggagtacgacgtgctggacaagcggagaggacgggacccagaaatgggcgggaagccgcgcagaaagaatccccaagagggcctgtacaacgagctccaaaaggataagatggcagaagcctatagcgagattggtatgaaaggggaacgcagaagaggcaaaggccacgacggactgtaccagggactcagcaccgccaccaaggacacctatgacgctcttcacatgcaggccctgccgcctcgg

SEQ ID NO: 236 - DNA, 1470 bp, Artificial Sequence
  source: /note="Description of Artificial Sequence: Synthetic polynucleotide"
atggccctccctgtcaccgccctgctgcttccgctggctcttctgctccacgccgctcggcccgaagtgcagcttgtcgaatccggggggggactggtcaagccgggcggatcactgagactgtcctgcgccgcgagcggcttcacgttctcctcctactccatgaactgggtccgccaagcccccgggaagggactggaatgggtgtcctctatctcctcgtcgtcgtcctacatctactacgccgactccgtgaagggaagattcaccatttcccgcgacaacgcaaagaactcactgtacttgcaaatgaactcactccgggccgaagatactgctgtgtactattgcgccaagactattgccgccgtctacgctttcgacatctggggccagggaaccaccgtgactgtgtcgtccggtggtggtggctcgggcggaggaggaagcggcggcggggggtccgagattgtgctgacccagtcgccactgagcctccctgtgacccccgaggaacccgccagcatcagctgccggtccagccagtccctgctccactccaacggatacaattacctcgattggtaccttcagaagcctggacaaagcccgcagctgctcatctacttgggatcaaaccgcgcgtcaggagtgcctgaccggttctccggctcgggcagcggtaccgatttcaccctgaaaatctccagggtggaggcagaggacgtgggagtgtattactgtatgcaggcgctgcagactccgtacacatttgggcagggcaccaagctggagatcaagaccactaccccagcaccgaggccacccaccccggctcctaccatcgcctcccagcctctgtccctgcgtccggaggcatgtagacccgcagctggtggggccgtgcatacccggggtcttgacttcgcctgcgatatctacatttgggcccctctggctggtacttgcggggtcctgctgctttcactcgtgatcactctttactgtaagcgcggtcggaagaagctgctgtacatctttaagcaacccttcatgaggcctgtgcagactactcaagaggaggacggctgttcatgccggttcccagaggaggaggaaggcggctgcgaactgcgcgtgaaattcagccgcagcgcagatgctccagcctacaagcaggggcagaaccagctctacaacgaactcaatcttggtcggagagaggagtacgacgtgctggacaagcggagaggacgggacccagaaatgggcgggaagccgcgcagaaagaatccccaagagggcctgtacaacgagctccaaaaggataagatggcagaagcctatagcgagattggtatgaaaggggaacgcagaagaggcaaaggccacgacggactgtaccagggactcagcaccgccaccaaggacacctatgacgctcttcacatgcaggccctgccgcctcgg

SEQ ID NO: 237 - DNA, 1452 bp, Artificial Sequence
  source: /note="Description of Artificial Sequence: Synthetic polynucleotide"
atggccctccctgtcaccgccctgctgcttccgctggctcttctgctccacgccgctcggcccgaagtccagctcgtggagtccggcggaggccttgtgaagcctggaggttcgctgagactgtcctgcgccgcctccggcttcaccttctccgactactacatgtcctggatcagacaggccccgggaaagggcctggaatgggtgtcctacatctcgtcatcgggcagcactatctactacgcggactcagtgaaggggcggttcaccatttcccgggataacgcgaagaactcgctgtatctgcaaatgaactcactgagggccgaggacaccgccgtgtactactgcgcccgcgatctccgcggggcatttgacatctggggacagggaaccatggtcacagtgtccagcggagggggaggatcgggtggcggaggttccgggggtggaggctcctcctacgtgctgactcagagcccaagcgtcagcgctgcgcccggttacacggcaaccatctcctgtggcggaaacaacattgggaccaagtctgtgcactggtatcagcagaagccgggccaagctcccctgttggtgatccgcgatgactccgtgcggcctagcaaaattccgggacggttctccggctccaacagcggcaatatggccactctcaccatctcgggagtgcaggccggagatgaagccgacttctactgccaagtctgggactcagactccgagcatgtggtgttcgggggcggaaccaagctgactgtgctcaccactaccccagcaccgaggccacccaccccggctcctaccatcgcctcccagcctctgtccctgcgtccggaggcatgtagacccgcagctggtggggccgtgcatacccggggtcttgacttcgcctgcgatatctacatttgggcccctctggctggtacttgcggggtcctgctgctttcactcgtgatcactctttactgtaagcgcggtcggaagaagctgctgtacatctttaagcaacccttcatgaggcctgtgcagactactcaagaggaggacggctgttcatgccggttcccagaggaggaggaaggcggctgcgaactgcgcgtgaaattcagccgcagcgcagatgctccagcctacaagcaggggcagaaccagctctacaacgaactcaatcttggtcggagagaggagtacgacgtgctggacaagcggagaggacgggacccagaaatgggcgggaagccgcgcagaaagaatccccaagagggcctgtacaacgagctccaaaaggataagatggcagaagcctatagcgagattggtatgaaaggggaacgcagaagaggcaaaggccacgacggactgtaccagggactcagcaccgccaccaaggacacctatgacgctcttcacatgcaggccctgccgcctcgg

SEQ ID NO: 238 - DNA, 1455 bp, Artificial Sequence
  source: /note="Description of Artificial Sequence: Synthetic polynucleotide"
atggccctccctgtcaccgccctgctgcttccgctggctcttctgctccacgccgctcggccccaagtgcagctggtgcagagcggggccgaagtcaagaagccgggagcctccgtgaaagtgtcctgcaagccttcgggatacaccgtgacctcccactacattcattgggtccgccgcgcccccggccaaggactcgagtggatgggcatgatcaaccctagcggcggagtgaccgcgtacagccagacgctgcagggacgcgtgactatgacctcggatacctcctcctccaccgtctatatggaactgtccagcctgcggtccgaggataccgccatgtactactgcgcccgggaaggatcaggctccgggtggtatttcgacttctggggaagaggcaccctcgtgactgtgtcatctgggggagggggttccggtggtggcggatcgggaggaggcggttcatcctacgtgctgacccagccaccctccgtgtccgtgagccccggccagactgcatcgattacatgtagcggcgacggcctctccaagaaatacgtgtcgtggtaccagcagaaggccggacagagcccggtggtgctgatctcaagagataaggagcggcctagcggaatcccggacaggttctcgggttccaactccgcggacactgctactctgaccatctcggggacccaggctatggacgaagccgattactactgccaagcctgggacgacactactgtcgtgtttggagggggcaccaagttgaccgtccttaccactaccccagcaccgaggccacccaccccggctcctaccatcgcctcccagcctctgtccctgcgtccggaggcatgtagacccgcagctggtggggccgtgcatacccggggtcttgacttcgcctgcgatatctacatttgggcccctctggctggtacttgcggggtcctgctgctttcactcgtgatcactctttactgtaagcgcggtcggaagaagctgctgtacatctttaagcaacccttcatgaggcctgtgcagactactcaagaggaggacggctgttcatgccggttcccagaggaggaggaaggcggctgcgaactgcgcgtgaaattcagccgcagcgcagatgctccagcctacaagcaggggcagaaccagctctacaacgaactcaatcttggtcggagagaggagtacgacgtgctggacaagcggagaggacgggacccagaaatgggcgggaagccgcgcagaaagaatccccaagagggcctgtacaacgagctccaaaaggataagatggcagaagcctatagcgagattggtatgaaaggggaacgcagaagaggcaaaggccacgacggactgtaccagggactcagcaccgccaccaaggacacctatgacgctcttcacatgcaggccctgccgcctcgg

SEQ ID NO: 239 - DNA, 1467 bp, Artificial Sequence
  source: /note="Description of Artificial Sequence: Synthetic polynucleotide"
atggccctccctgtcaccgccctgctgcttccgctggctcttctgctccacgccgctcggccccaagtgcagcttcaggagagcggcccgggactcgtgaagccgtcccagaccctgtccctgacttgcaccgtgtcgggaggaagcatctcgagcggaggctactattggtcgtggattcggcagcaccctggaaagggcctggaatggatcggctacatctactactccggctcgacctactacaacccatcgctgaagtccagagtgacaatctcagtggacacgtccaagaatcagttcagcctgaagctctcttccgtgactgcggccgacaccgccgtgtactactgcgcacgcgctggaattgccgcccggctgaggggtgccttcgacatttggggacagggcaccatggtcaccgtgtcctccggcggcggaggttccgggggtggaggctcaggaggaggggggtccgacatcgtcatgactcagtcgccctcaagcgtcagcgcgtccgtcggggacagagtgatcatcacctgtcgggcgtcccagggaattcgcaactggctggcctggtatcagcagaagcccggaaaggcccccaacctgttgatctacgccgcctcaaacctccaatccggggtgccgagccgcttcagcggctccggttcgggtgccgatttcactctgaccatctcctccctgcaacctgaagatgtggctacctactactgccaaaagtacaactccgcaccttttactttcggaccggggaccaaagtggacattaagaccactaccccagcaccgaggccacccaccccggctcctaccatcgcctcccagcctctgtccctgcgtccggaggcatgtagacccgcagctggtggggccgtgcatacccggggtcttgacttcgcctgcgatatctacatttgggcccctctggctggtacttgcggggtcctgctgctttcactcgtgatcactctttactgtaagcgcggtcggaagaagctgctgtacatctttaagcaacccttcatgaggcctgtgcagactactcaagaggaggacggctgttcatgccggttcccagaggaggaggaaggcggctgcgaactgcgcgtgaaattcagccgcagcgcagatgctccagcctacaagcaggggcagaaccagctctacaacgaactcaatcttggtcggagagaggagtacgacgtgctggacaagcggagaggacgggacccagaaatgggcgggaagccgcgcagaaagaatccccaagagggcctgtacaacgagctccaaaaggataagatggcagaagcctatagcgagattggtatgaaaggggaacgcagaagaggcaaaggccacgacggactgtaccagggactcagcaccgccaccaaggacacctatgacgctcttcacatgcaggccctgccgcctcgg

SEQ ID NO: 240 - DNA, 1491 bp, Artificial Sequence
  source: /note="Description of Artificial Sequence: Synthetic polynucleotide"
atggccctccctgtcaccgccctgctgcttccgctggctcttctgctccacgccgctcggccccaagtgcagctggtccagtcgggcgccgaggtcaagaagcccgggagctctgtgaaagtgtcctgcaaggcctccgggggcacctttagctcctacgccatctcctgggtccgccaagcaccgggtcaaggcctggagtggatggggggaattatccctatcttcggcactgccaactacgcccagaagttccagggacgcgtgaccattaccgcggacgaatccacctccaccgcttatatggagctgtccagcttgcgctcggaagataccgccgtgtactactgcgcccggaggggtggataccagctgctgagatgggacgtgggcctcctgcggtcggcgttcgacatctggggccagggcactatggtcactgtgtccagcggaggaggcggatcgggaggcggcggatcagggggaggcggttccagctacgtgcttactcaacccccttcggtgtccgtggccccgggacagaccgccagaatcacttgcggaggaaacaacattgggtccaagagcgtgcattggtaccagcagaagccaggacaggcccctgtgctggtgctctacgggaagaacaatcggcccagcggagtgccggacaggttctcgggttcacgctccggtacaaccgcttcactgactatcaccggggcccaggcagaggatgaagcggactactactgttcctcccgggattcatccggcgaccacctccgggtgttcggaaccggaacgaaggtcaccgtgctgaccactaccccagcaccgaggccacccaccccggctcctaccatcgcctcccagcctctgtccctgcgtccggaggcatgtagacccgcagctggtggggccgtgcatacccggggtcttgacttcgcctgcgatatctacatttgggcccctctggctggtacttgcggggtcctgctgctttcactcgtgatcactctttactgtaagcgcggtcggaagaagctgctgtacatctttaagcaacccttcatgaggcctgtgcagactactcaagaggaggacggctgttcatgccggttcccagaggaggaggaaggcggctgcgaactgcgcgtgaaattcagccgcagcgcagatgctccagcctacaagcaggggcagaaccagctctacaacgaactcaatcttggtcggagagaggagtacgacgtgctggacaagcggagaggacgggacccagaaatgggcgggaagccgcgcagaaagaatccccaagagggcctgtacaacgagctccaaaaggataagatggcagaagcctatagcgagattggtatgaaaggggaacgcagaagaggcaaaggccacgacggactgtaccagggactcagcaccgccaccaaggacacctatgacgctcttcacatgcaggccctgccgcctcgg

SEQ ID NO: 241 - DNA, 1476 bp, Artificial Sequence
  source: /note="Description of Artificial Sequence: Synthetic polynucleotide"
atggccctccctgtcaccgccctgctgcttccgctggctcttctgctccacgccgctcggcccgaagtgcagctccaacagtcaggaccggggctcgtgaagccatcccagaccctgtccctgacttgtgccatctcgggagatagcgtgtcatcgaactccgccgcctggaactggattcggcagagcccgtcccgcggactggagtggcttggaaggacctactaccggtccaagtggtactctttctacgcgatctcgctgaagtcccgcattatcattaaccctgatacctccaagaatcagttctccctccaactgaaatccgtcacccccgaggacacagcagtgtattactgcgcacggagcagccccgaaggactgttcctgtattggtttgacccctggggccaggggactcttgtgaccgtgtcgagcggcggagatgggtccggtggcggtggttcggggggcggcggatcatcatccgaactgacccaggacccggctgtgtccgtggcgctgggacaaaccatccgcattacgtgccagggagactccctgggcaactactacgccacttggtaccagcagaagccgggccaagcccctgtgttggtcatctacgggaccaacaacagaccttccggcatccccgaccggttcagcgcttcgtcctccggcaacactgccagcctgaccatcactggagcgcaggccgaagatgaggccgactactactgcaacagcagagactcctcgggtcatcacctcttgttcggaactggaaccaaggtcaccgtgctgaccactaccccagcaccgaggccacccaccccggctcctaccatcgcctcccagcctctgtccctgcgtccggaggcatgtagacccgcagctggtggggccgtgcatacccggggtcttgacttcgcctgcgatatctacatttgggcccctctggctggtacttgcggggtcctgctgctttcactcgtgatcactctttactgtaagcgcggtcggaagaagctgctgtacatctttaagcaacccttcatgaggcctgtgcagactactcaagaggaggacggctgttcatgccggttcccagaggaggaggaaggcggctgcgaactgcgcgtgaaattcagccgcagcgcagatgctccagcctacaagcaggggcagaaccagctctacaacgaactcaatcttggtcggagagaggagtacgacgtgctggacaagcggagaggacgggacccagaaatgggcgggaagccgcgcagaaagaatccccaagagggcctgtacaacgagctccaaaaggataagatggcagaagcctatagcgagattggtatgaaaggggaacgcagaagaggcaaaggccacgacggactgtaccagggactcagcaccgccaccaaggacacctatgacgctcttcacatgcaggccctgccgcctcgg

SEQ ID NO: 242 - DNA, 1470 bp, Artificial Sequence
  source: /note="Description of Artificial Sequence: Synthetic polynucleotide"
atggccctccctgtcaccgccctgctgcttccgctggctcttctgctccacgccgctcggcccgaagtgcagctcgtggagtcaggaggcggcctggtccagccgggagggtcccttagactgtcatgcgccgcaagcggattcactttctcctcctatgccatgagctgggtccgccaagcccccggaaagggactggaatgggtgtccgccatctcggggtctggaggctcaacttactacgctgactccgtgaagggacggttcaccattagccgcgacaactccaagaacaccctctacctccaaatgaactccctgcgggccgaggataccgccgtctactactgcgccaaagtggaaggttcaggatcgctggactactggggacagggtactctcgtgaccgtgtcatcgggcggaggaggttccggcggtggcggctccggcggcggagggtcggagatcgtgatgacccagagccctggtactctgagcctttcgccgggagaaagggccaccctgtcctgccgcgcttcccaatccgtgtcctccgcgtacttggcgtggtaccagcagaagccgggacagccccctcggctgctgatcagcggggccagcacccgggcaaccggaatcccagacagattcgggggttccggcagcggcacagatttcaccctgactatttcgaggttggagcccgaggactttgcggtgtattactgtcagcactacgggtcgtcctttaatggctccagcctgttcacgttcggacaggggacccgcctggaaatcaagaccactaccccagcaccgaggccacccaccccggctcctaccatcgcctcccagcctctgtccctgcgtccggaggcatgtagacccgcagctggtggggccgtgcatacccggggtcttgacttcgcctgcgatatctacatttgggcccctctggctggtacttgcggggtcctgctgctttcactcgtgatcactctttactgtaagcgcggtcggaagaagctgctgtacatctttaagcaacccttcatgaggcctgtgcagactactcaagaggaggacggctgttcatgccggttcccagaggaggaggaaggcggctgcgaactgcgcgtgaaattcagccgcagcgcagatgctccagcctacaagcaggggcagaaccagctctacaacgaactcaatcttggtcggagagaggagtacgacgtgctggacaagcggagaggacgggacccagaaatgggcgggaagccgcgcagaaagaatccccaagagggcctgtacaacgagctccaaaaggataagatggcagaagcctatagcgagattggtatgaaaggggaacgcagaagaggcaaaggccacgacggactgtaccagggactcagcaccgccaccaaggacacctatgacgctcttcacatgcaggccctgccgcctcgg

SEQ ID NO: 243 - DNA, 1455 bp, Artificial Sequence
  source: /note="Description of Artificial Sequence: Synthetic polynucleotide"
atggccctccctgtcaccgccctgctgcttccgctggctcttctgctccacgccgctcggcccgaagtgcaactggtggaaaccggtggcggcctggtgcagcctggaggatcattgaggctgtcatgcgcggccagcggtattaccttctcccggtaccccatgtcctgggtcagacaggccccggggaaagggcttgaatgggtgtccgggatctcggactccggtgtcagcacttactacgccgactccgccaagggacgcttcaccatttcccgggacaactcgaagaacaccctgttcctccaaatgagctccctccgggacgaggatactgcagtgtactactgcgtgacccgcgccgggtccgaggcgtctgacatttggggacagggcactatggtcaccgtgtcgtccggcggagggggctcgggaggcggtggcagcggaggaggagggtccgagatcgtgctgacccaatccccggccaccctctcgctgagccctggagaaagggcaaccttgtcctgtcgcgcgagccagtccgtgagcaactccctggcctggtaccagcagaagcccggacaggctccgagacttctgatctacgacgcttcgagccgggccactggaatccccgaccgcttttcggggtccggctcaggaaccgatttcaccctgacaatctcacggctggagccagaggatttcgccatctattactgccagcagttcggtacttcctccggcctgactttcggaggcggcacgaagctcgaaatcaagaccactaccccagcaccgaggccacccaccccggctcctaccatcgcctcccagcctctgtccctgcgtccggaggcatgtagacccgcagctggtggggccgtgcatacccggggtcttgacttcgcctgcgatatctacatttgggcccctctggctggtacttgcggggtcctgctgctttcactcgtgatcactctttactgtaagcgcggtcggaagaagctgctgtacatctttaagcaacccttcatgaggcctgtgcagactactcaagaggaggacggctgttcatgccggttcccagaggaggaggaaggcggctgcgaactgcgcgtgaaattcagccgcagcgcagatgctccagcctacaagcaggggcagaaccagctctacaacgaactcaatcttggtcggagagaggagtacgacgtgctggacaagcggagaggacgggacccagaaatgggcgggaagccgcgcagaaagaatccccaagagggcctgtacaacgagctccaaaaggataagatggcagaagcctatagcgagattggtatgaaaggggaacgcagaagaggcaaaggccacgacggactgtaccagggactcagcaccgccaccaaggacacctatgacgctcttcacatgcaggccctgccgcctcgg

SEQ ID NO: 244 - DNA, 1476 bp, Artificial Sequence
  source: /note="Description of Artificial Sequence: Synthetic polynucleotide"
atggccctccctgtcaccgccctgctgcttccgctggctcttctgctccacgccgctcggccccaagtgcagctcgtggaatcgggtggcggactggtgcagccggggggctcacttagactgtcctgcgcggccagcggattcactttctcctcctacgccatgtcctgggtcagacaggcccctggaaagggcctggaatgggtgtccgcaatcagcggcagcggcggctcgacctattacgcggattcagtgaagggcagattcaccatttcccgggacaacgccaagaactccttgtaccttcaaatgaactccctccgcgcggaagataccgcaatctactactgcgctcgggccacttacaagagggaactgcgctactactacgggatggacgtctggggccagggaaccatggtcaccgtgtccagcggaggaggaggatcgggaggaggcggtagcgggggtggagggtcggagatcgtgatgacccagtcccccggcactgtgtcgctgtcccccggcgaacgggccaccctgtcatgtcgggccagccagtcagtgtcgtcaagcttcctcgcctggtaccagcagaaaccgggacaagctccccgcctgctgatctacggagccagcagccgggccaccggtattcctgaccggttctccggttcggggtccgggaccgactttactctgactatctctcgcctcgagccagaggactccgccgtgtattactgccagcagtaccactcctccccgtcctggacgttcggacagggcacaaggctggagattaagaccactaccccagcaccgaggccacccaccccggctcctaccatcgcctcccagcctctgtccctgcgtccggaggcatgtagacccgcagctggtggggccgtgcatacccggggtcttgacttcgcctgcgatatctacatttgggcccctctggctggtacttgcggggtcctgctgctttcactcgtgatcactctttactgtaagcgcggtcggaagaagctgctgtacatctttaagcaacccttcatgaggcctgtgcagactactcaagaggaggacggctgttcatgccggttcccagaggaggaggaaggcggctgcgaactgcgcgtgaaattcagccgcagcgcagatgctccagcctacaagcaggggcagaaccagctctacaacgaactcaatcttggtcggagagaggagtacgacgtgctggacaagcggagaggacgggacccagaaatgggcgggaagccgcgcagaaagaatccccaagagggcctgtacaacgagctccaaaaggataagatggcagaagcctatagcgagattggtatgaaaggggaacgcagaagaggcaaaggccacgacggactgtaccagggactcagcaccgccaccaaggacacctatgacgctcttcacatgcaggccctgccgcctcgg

SEQ ID NO: 245 - DNA, 1476 bp, Artificial Sequence
  source: /note="Description of Artificial Sequence: Synthetic polynucleotide"
atggccctccctgtcaccgccctgctgcttccgctggctcttctgctccacgccgctcggcccgaggtgcagcttgtggaaaccggtggcggactggtgcagcccggaggaagcctcaggctgtcctgcgccgcgtccggcttcaccttctcctcgtacgccatgtcctgggtccgccaggcccccggaaagggcctggaatgggtgtccgccatctctggaagcggaggttccacgtactacgcggacagcgtcaagggaaggttcacaatctcccgcgataattcgaagaacactctgtaccttcaaatgaacaccctgaaggccgaggacactgctgtgtactactgcgcacgggccacctacaagagagagctccggtactactacggaatggacgtctggggccagggaactactgtgaccgtgtcctcgggagggggtggctccggggggggcggctccggcggaggcggttccgagattgtgctgacccagtcaccttcaactctgtcgctgtccccgggagagagcgctactctgagctgccgggccagccagtccgtgtccaccaccttcctcgcctggtatcagcagaagccggggcaggcaccacggctcttgatctacgggtcaagcaacagagcgaccggaattcctgaccgcttctcggggagcggttcaggcaccgacttcaccctgactatccggcgcctggaacccgaagatttcgccgtgtattactgtcaacagtaccactcctcgccgtcctggacctttggccaaggaaccaaagtggaaatcaagaccactaccccagcaccgaggccacccaccccggctcctaccatcgcctcccagcctctgtccctgcgtccggaggcatgtagacccgcagctggtggggccgtgcatacccggggtcttgacttcgcctgcgatatctacatttgggcccctctggctggtacttgcggggtcctgctgctttcactcgtgatcactctttactgtaagcgcggtcggaagaagctgctgtacatctttaagcaacccttcatgaggcctgtgcagactactcaagaggaggacggctgttcatgccggttcccagaggaggaggaaggcggctgcgaactgcgcgtgaaattcagccgcagcgcagatgctccagcctacaagcaggggcagaaccagctctacaacgaactcaatcttggtcggagagaggagtacgacgtgctggacaagcggagaggacgggacccagaaatgggcgggaagccgcgcagaaagaatccccaagagggcctgtacaacgagctccaaaaggataagatggcagaagcctatagcgagattggtatgaaaggggaacgcagaagaggcaaaggccacgacggactgtaccagggactcagcaccgccaccaaggacacctatgacgctcttcacatgcaggccctgccgcctcgg

SEQ ID NO: 246 - DNA, 1449 bp, Artificial Sequence
  source: /note="Description of Artificial Sequence: Synthetic polynucleotide"
atggccctccctgtcaccgccctgctgcttccgctggctcttctgctccacgccgctcggcccgaagtgcagctcgtggaaactggaggtggactcgtgcagcctggacggtcgctgcggctgagctgcgctgcatccggcttcaccttcgacgattatgccatgcactgggtcagacaggcgccagggaagggacttgagtgggtgtccggtatcagctggaatagcggctcaatcggatacgcggactccgtgaagggaaggttcaccatttcccgcgacaacgccaagaactccctgtacttgcaaatgaacagcctccgggatgaggacactgccgtgtactactgcgcccgcgtcggaaaagctgtgcccgacgtctggggccagggaaccactgtgaccgtgtccagcggcgggggtggatcgggcggtggagggtccggtggagggggctcagatattgtgatgacccagaccccctcgtccctgtccgcctcggtcggcgaccgcgtgactatcacatgtagagcctcgcagagcatctccagctacctgaactggtatcagcagaagccggggaaggccccgaagctcctgatctacgcggcatcatcactgcaatcgggagtgccgagccggttttccgggtccggctccggcaccgacttcacgctgaccatttcttccctgcaacccgaggacttcgccacttactactgccagcagtcctactccaccccttactccttcggccaaggaaccaggctggaaatcaagaccactaccccagcaccgaggccacccaccccggctcctaccatcgcctcccagcctctgtccctgcgtccggaggcatgtagacccgcagctggtggggccgtgcatacccggggtcttgacttcgcctgcgatatctacatttgggcccctctggctggtacttgcggggtcctgctgctttcactcgtgatcactctttactgtaagcgcggtcggaagaagctgctgtacatctttaagcaacccttcatgaggcctgtgcagactactcaagaggaggacggctgttcatgccggttcccagaggaggaggaaggcggctgcgaactgcgcgtgaaattcagccgcagcgcagatgctccagcctacaagcaggggcagaaccagctctacaacgaactcaatcttggtcggagagaggagtacgacgtgctggacaagcggagaggacgggacccagaaatgggcgggaagccgcgcagaaagaatccccaagagggcctgtacaacgagctccaaaaggataagatggcagaagcctatagcgagattggtatgaaaggggaacgcagaagaggcaaaggccacgacggactgtaccagggactcagcaccgccaccaaggacacctatgacgctcttcacatgcaggccctgccgcctcgg

SEQ ID NO: 247 - DNA, 1470 bp, Artificial Sequence
  source: /note="Description of Artificial Sequence: Synthetic polynucleotide"
atggccctccctgtcaccgccctgctgcttccgctggctcttctgctccacgccgctcggcccgaagtgcagctcgtggagagcgggggaggattggtgcagcccggaaggtccctgcggctctcctgcactgcgtctggcttcaccttcgacgactacgcgatgcactgggtcagacagcgcccgggaaagggcctggaatgggtcgcctcaatcaactggaagggaaactccctggcctatggcgacagcgtgaagggccgcttcgccatttcgcgcgacaacgccaagaacaccgtgtttctgcaaatgaattccctgcggaccgaggataccgctgtgtactactgcgccagccaccagggcgtggcatactataactacgccatggacgtgtggggaagagggacgctcgtcaccgtgtcctccgggggcggtggatcgggtggaggaggaagcggtggcgggggcagcgaaatcgtgctgactcagagcccgggaactctttcactgtccccgggagaacgggccactctctcgtgccgggccacccagtccatcggctcctccttccttgcctggtaccagcagaggccaggacaggcgccccgcctgctgatctacggtgcttcccaacgcgccactggcattcctgaccggttcagcggcagagggtcgggaaccgatttcacactgaccatttcccgggtggagcccgaagattcggcagtctactactgtcagcattacgagtcctccccttcatggaccttcggtcaagggaccaaagtggagatcaagaccactaccccagcaccgaggccacccaccccggctcctaccatcgcctcccagcctctgtccctgcgtccggaggcatgtagacccgcagctggtggggccgtgcatacccggggtcttgacttcgcctgcgatatctacatttgggcccctctggctggtacttgcggggtcctgctgctttcactcgtgatcactctttactgtaagcgcggtcggaagaagctgctgtacatctttaagcaacccttcatgaggcctgtgcagactactcaagaggaggacggctgttcatgccggttcccagaggaggaggaaggcggctgcgaactgcgcgtgaaattcagccgcagcgcagatgctccagcctacaagcaggggcagaaccagctctacaacgaactcaatcttggtcggagagaggagtacgacgtgctggacaagcggagaggacgggacccagaaatgggcgggaagccgcgcagaaagaatccccaagagggcctgtacaacgagctccaaaaggataagatggcagaagcctatagcgagattggtatgaaaggggaacgcagaagaggcaaaggccacgacggactgtaccagggactcagcaccgccaccaaggacacctatgacgctcttcacatgcaggccctgccgcctcgg

SEQ ID NO: 248 - DNA, 1455 bp, Artificial Sequence
  source: /note="Description of Artificial Sequence: Synthetic polynucleotide"
atggccctccctgtcaccgccctgctgcttccgctggctcttctgctccacgccgctcggcccgaggtgcagttggtcgaaagcgggggcgggcttgtgcagcctggcggatcactgcggctgtcctgcgcggcatcaggcttcacgttttcttcctacgccatgtcctgggtgcgccaggcccctggaaagggactggaatgggtgtccgcgatttcggggtccggcgggagcacctactacgccgattccgtgaagggccgcttcactatctcgcgggacaactccaagaacaccctctacctccaaatgaatagcctgcgggccgaggataccgccgtctactattgcgctaaggtcgtgcgcgacggaatggacgtgtggggacagggtaccaccgtgacagtgtcctcggggggaggcggtagcggcggaggaggaagcggtggtggaggttccgagattgtgctgactcaatcacccgcgaccctgagcctgtcccccggcgaaagggccactctgtcctgtcgggccagccaatcagtctcctcctcgtacctggcctggtaccagcagaagccaggacaggctccgagactccttatctatggcgcatcctcccgcgccaccggaatcccggataggttctcgggaaacggatcggggaccgacttcactctcaccatctcccggctggaaccggaggacttcgccgtgtactactgccagcagtacggcagcccgcctagattcactttcggccccggcaccaaagtggacatcaagaccactaccccagcaccgaggccacccaccccggctcctaccatcgcctcccagcctctgtccctgcgtccggaggcatgtagacccgcagctggtggggccgtgcatacccggggtcttgacttcgcctgcgatatctacatttgggcccctctggctggtacttgcggggtcctgctgctttcactcgtgatcactctttactgtaagcgcggtcggaagaagctgctgtacatctttaagcaacccttcatgaggcctgtgcagactactcaagaggaggacggctgttcatgccggttcccagaggaggaggaaggcggctgcgaactgcgcgtgaaattcagccgcagcgcagatgctccagcctacaagcaggggcagaaccagctctacaacgaactcaatcttggtcggagagaggagtacgacgtgctggacaagcggagaggacgggacccagaaatgggcgggaagccgcgcagaaagaatccccaagagggcctgtacaacgagctccaaaaggataagatggcagaagcctatagcgagattggtatgaaaggggaacgcagaagaggcaaaggccacgacggactgtaccagggactcagcaccgccaccaaggacacctatgacgctcttcacatgcaggccctgccgcctcgg

SEQ ID NO: 249 - DNA, 1458 bp, Artificial Sequence
  source: /note="Description of Artificial Sequence: Synthetic polynucleotide"
atggccctccctgtcaccgccctgctgcttccgctggctcttctgctccacgccgctcggcccgaagtgcagctgctggagtccggcggtggattggtgcaaccggggggatcgctcagactgtcctgtgcggcgtcaggcttcaccttctcgagctacgccatgtcatgggtcagacaggcccctggaaagggtctggaatgggtgtccgccatttccgggagcgggggatctacatactacgccgatagcgtgaagggccgcttcaccatttcccgggacaactccaagaacactctctatctgcaaatgaactccctccgcgctgaggacactgccgtgtactactgcgccaaaatccctcagaccggcaccttcgactactggggacaggggactctggtcaccgtcagcagcggtggcggaggttcggggggaggaggaagcggcggcggagggtccgagattgtgctgacccagtcacccggcactttgtccctgtcgcctggagaaagggccaccctttcctgccgggcatcccaatccgtgtcctcctcgtacctggcctggtaccagcagaggcccggacaggccccacggcttctgatctacggagcaagcagccgcgcgaccggtatcccggaccggttttcgggctcgggctcaggaactgacttcaccctcaccatctcccgcctggaacccgaagatttcgctgtgtattactgccagcactacggcagctccccgtcctggacgttcggccagggaactcggctggagatcaagaccactaccccagcaccgaggccacccaccccggctcctaccatcgcctcccagcctctgtccctgcgtccggaggcatgtagacccgcagctggtggggccgtgcatacccggggtcttgacttcgcctgcgatatctacatttgggcccctctggctggtacttgcggggtcctgctgctttcactcgtgatcactctttactgtaagcgcggtcggaagaagctgctgtacatctttaagcaacccttcatgaggcctgtgcagactactcaagaggaggacggctgttcatgccggttcccagaggaggaggaaggcggctgcgaactgcgcgtgaaattcagccgcagcgcagatgctccagcctacaagcaggggcagaaccagctctacaacgaactcaatcttggtcggagagaggagtacgacgtgctggacaagcggagaggacgggacccagaaatgggcgggaagccgcgcagaaagaatccccaagagggcctgtacaacgagctccaaaaggataagatggcagaagcctatagcgagattggtatgaaaggggaacgcagaagaggcaaaggccacgacggactgtaccagggactcagcaccgccaccaaggacacctatgacgctcttcacatgcaggccctgccgcctcgg

SEQ ID NO: 250 - DNA, 1476 bp, Artificial Sequence
  source: /note="Description of Artificial Sequence: Synthetic polynucleotide"
atggccctccctgtcaccgccctgctgcttccgctggctcttctgctccacgccgctcggcccgaagtgcaactggtggaaaccggtggaggactcgtgcagcctggcggcagcctccggctgagctgcgccgcttcgggattcaccttttcctcctacgcgatgtcttgggtcagacaggcccccggaaaggggctggaatgggtgtcagccatctccggctccggcggatcaacgtactacgccgactccgtgaaaggccggttcaccatgtcgcgcgagaatgacaagaactccgtgttcctgcaaatgaactccctgagggtggaggacaccggagtgtactattgtgcgcgcgccaactacaagagagagctgcggtactactacggaatggacgtctggggacagggaactatggtgaccgtgtcatccggtggagggggaagcggcggtggaggcagcgggggcgggggttcagaaattgtcatgacccagtccccgggaactctttccctctcccccggggaatccgcgactttgtcctgccgggccagccagcgcgtggcctcgaactacctcgcatggtaccagcataagccaggccaagccccttccctgctgatttccggggctagcagccgcgccactggcgtgccggataggttctcgggaagcggctcgggtaccgatttcaccctggcaatctcgcggctggaaccggaggattcggccgtgtactactgccagcactatgactcatccccctcctggacattcggacagggcaccaaggtcgagatcaagaccactaccccagcaccgaggccacccaccccggctcctaccatcgcctcccagcctctgtccctgcgtccggaggcatgtagacccgcagctggtggggccgtgcatacccggggtcttgacttcgcctgcgatatctacatttgggcccctctggctggtacttgcggggtcctgctgctttcactcgtgatcactctttactgtaagcgcggtcggaagaagctgctgtacatctttaagcaacccttcatgaggcctgtgcagactactcaagaggaggacggctgttcatgccggttcccagaggaggaggaaggcggctgcgaactgcgcgtgaaattcagccgcagcgcagatgctccagcctacaagcaggggcagaaccagctctacaacgaactcaatcttggtcggagagaggagtacgacgtgctggacaagcggagaggacgggacccagaaatgggcgggaagccgcgcagaaagaatccccaagagggcctgtacaacgagctccaaaaggataagatggcagaagcctatagcgagattggtatgaaaggggaacgcagaagaggcaaaggccacgacggactgtaccagggactcagcaccgccaccaaggacacctatgacgctcttcacatgcaggccctgccgcctcgg

SEQ ID NO: 251 - DNA, 1464 bp, Artificial Sequence
  source: /note="Description of Artificial Sequence: Synthetic polynucleotide"
atggccctccctgtcaccgccctgctgcttccgctggctcttctgctccacgccgctcggcccgaagtgcagctgctcgaaaccggtggagggctggtgcagccagggggctccctgaggctttcatgcgccgctagcggattctccttctcctcttacgccatgtcgtgggtccgccaagcccctggaaaaggcctggaatgggtgtccgcgatttccgggagcggaggttcgacctattacgccgactccgtgaagggccgctttaccatctcccgggataactccaagaacactctgtacctccaaatgaactcgctgagagccgaggacaccgccgtgtattactgcgcgaaggcgctggtcggcgcgactggggcattcgacatctggggacagggaactcttgtgaccgtgtcgagcggaggcggcggctccggcggaggagggagcgggggcggtggttccgaaatcgtgttgactcagtccccgggaaccctgagcttgtcacccggggagcgggccactctctcctgtcgcgcctcccaatcgctctcatccaatttcctggcctggtaccagcagaagcccggacaggccccgggcctgctcatctacggcgcttcaaactgggcaacgggaacccctgatcggttcagcggaagcggatcgggtactgactttaccctgaccatcaccagactggaaccggaggacttcgccgtgtactactgccagtactacggcacctcccccatgtacacattcggacagggtaccaaggtcgagattaagaccactaccccagcaccgaggccacccaccccggctcctaccatcgcctcccagcctctgtccctgcgtccggaggcatgtagacccgcagctggtggggccgtgcatacccggggtcttgacttcgcctgcgatatctacatttgggcccctctggctggtacttgcggggtcctgctgctttcactcgtgatcactctttactgtaagcgcggtcggaagaagctgctgtacatctttaagcaacccttcatgaggcctgtgcagactactcaagaggaggacggctgttcatgccggttcccagaggaggaggaaggcggctgcgaactgcgcgtgaaattcagccgcagcgcagatgctccagcctacaagcaggggcagaaccagctctacaacgaactcaatcttggtcggagagaggagtacgacgtgctggacaagcggagaggacgggacccagaaatgggcgggaagccgcgcagaaagaatccccaagagggcctgtacaacgagctccaaaaggataagatggcagaagcctatagcgagattggtatgaaaggggaacgcagaagaggcaaaggccacgacggactgtaccagggactcagcaccgccaccaaggacacctatgacgctcttcacatgcaggccctgccgcctcgg

SEQ ID NO: 252 - DNA, 1464 bp, Artificial Sequence
  source: /note="Description of Artificial Sequence: Synthetic polynucleotide"
atggccctccctgtcaccgccctgctgcttccgctggctcttctgctccacgccgctcggcccgaagtgcagctgcttgagagcggtggaggtctggtgcagcccgggggatcactgcgcctgtcctgtgccgcgtccggtttcactttctcctcgtacgccatgtcgtgggtcagacaggcaccgggaaagggactggaatgggtgtcagccatttcgggttcggggggcagcacctactacgctgactccgtgaagggccggttcaccatttcccgcgacaactccaagaacaccttgtacctccaaatgaactccctgcgggccgaagataccgccgtgtattactgcgtgctgtggttcggagagggattcgacccgtggggacaaggaacactcgtgactgtgtcatccggcggaggcggcagcggtggcggcggttccggcggcggcggatctgacatcgtgttgacccagtcccctctgagcctgccggtcactcctggcgaaccagccagcatctcctgccggtcgagccagtccctcctgcactccaatgggtacaactacctcgattggtatctgcaaaagccgggccagagcccccagctgctgatctaccttgggtcaaaccgcgcttccggggtgcctgatagattctccgggtccgggagcggaaccgactttaccctgaaaatctcgagggtggaggccgaggacgtcggagtgtactactgcatgcaggcgctccagactcccctgaccttcggaggaggaacgaaggtcgacatcaagaccactaccccagcaccgaggccacccaccccggctcctaccatcgcctcccagcctctgtccctgcgtccggaggcatgtagacccgcagctggtggggccgtgcatacccggggtcttgacttcgcctgcgatatctacatttgggcccctctggctggtacttgcggggtcctgctgctttcactcgtgatcactctttactgtaagcgcggtcggaagaagctgctgtacatctttaagcaacccttcatgaggcctgtgcagactactcaagaggaggacggctgttcatgccggttcccagaggaggaggaaggcggctgcgaactgcgcgtgaaattcagccgcagcgcagatgctccagcctacaagcaggggcagaaccagctctacaacgaactcaatcttggtcggagagaggagtacgacgtgctggacaagcggagaggacgggacccagaaatgggcgggaagccgcgcagaaagaatccccaagagggcctgtacaacgagctccaaaaggataagatggcagaagcctatagcgagattggtatgaaaggggaacgcagaagaggcaaaggccacgacggactgtaccagggactcagcaccgccaccaaggacacctatgacgctcttcacatgcaggccctgccgcctcgg

SEQ ID NO: 253 - DNA, 1485 bp, Artificial Sequence
  source: /note="Description of Artificial Sequence: Synthetic polynucleotide"
atggccctccctgtcaccgccctgctgcttccgctggctcttctgctccacgccgctcggccccaagtgcagctcgtggagtcaggcggaggactggtgcagcccgggggctccctgagactttcctgcgcggcatcgggttttaccttctcctcctatgctatgtcctgggtgcgccaggccccgggaaagggactggaatgggtgtccgcaatcagcggtagcgggggctcaacatactacgccgactccgtcaagggtcgcttcactatttcccgggacaactccaagaataccctgtacctccaaatgaacagcctcagggccgaggatactgccgtgtactactgcgccaaagtcggatacgatagctccggttactaccgggactactacggaatggacgtgtggggacagggcaccaccgtgaccgtgtcaagcggcggaggcggttcaggagggggaggctccggcggtggagggtccgaaatcgtcctgactcagtcgcctggcactctgtcgttgtccccgggggagcgcgctaccctgtcgtgtcgggcgtcgcagtccgtgtcgagctcctacctcgcgtggtaccagcagaagcccggacaggcccctagacttctgatctacggcacttcttcacgcgccaccgggatcagcgacaggttcagcggctccggctccgggaccgacttcaccctgaccattagccggctggagcctgaagatttcgccgtgtattactgccaacactacggaaactcgccgccaaagttcacgttcggacccggaaccaagctggaaatcaagaccactaccccagcaccgaggccacccaccccggctcctaccatcgcctcccagcctctgtccctgcgtccggaggcatgtagacccgcagctggtggggccgtgcatacccggggtcttgacttcgcctgcgatatctacatttgggcccctctggctggtacttgcggggtcctgctgctttcactcgtgatcactctttactgtaagcgcggtcggaagaagctgctgtacatctttaagcaacccttcatgaggcctgtgcagactactcaagaggaggacggctgttcatgccggttcccagaggaggaggaaggcggctgcgaactgcgcgtgaaattcagccgcagcgcagatgctccagcctacaagcaggggcagaaccagctctacaacgaactcaatcttggtcggagagaggagtacgacgtgctggacaagcggagaggacgggacccagaaatgggcgggaagccgcgcagaaagaatccccaagagggcctgtacaacgagctccaaaaggataagatggcagaagcctatagcgagattggtatgaaaggggaacgcagaagaggcaaaggccacgacggactgtaccagggactcagcaccgccaccaaggacacctatgacgctcttcacatgcaggccctgccgcctcgg

SEQ ID NO: 254 - DNA, 1470 bp, Artificial Sequence
  source: /note="Description of Artificial Sequence: Synthetic polynucleotide"
atggccctccctgtcaccgccctgctgcttccgctggctcttctgctccacgccgctcggcccgaagtccaactggtggagtccgggggagggctcgtgcagcccggaggcagccttcggctgtcgtgcgccgcctccgggttcacgttctcatcctacgcgatgtcgtgggtcagacaggcaccaggaaagggactggaatgggtgtccgccattagcggctccggcggtagcacctactatgccgactcagtgaagggaaggttcactatctcccgcgacaacagcaagaacaccctgtacctccaaatgaactctctgcgggccgaggataccgcggtgtactattgcgccaagatgggttggtccagcggatacttgggagccttcgacatttggggacagggcactactgtgaccgtgtcctccgggggtggcggatcgggaggcggcggctcgggtggagggggttccgaaatcgtgttgacccagtcaccgggaaccctctcgctgtccccgggagaacgggctacactgtcatgtagagcgtcccagtccgtggcttcctcgttcctggcctggtaccagcagaagccgggacaggcaccccgcctgctcatctacggagccagcggccgggcgaccggcatccctgaccgcttctccggttccggctcgggcaccgactttactctgaccattagcaggcttgagcccgaggattttgccgtgtactactgccaacactacggggggagccctcgcctgaccttcggaggcggaactaaggtcgatatcaaaaccactaccccagcaccgaggccacccaccccggctcctaccatcgcctcccagcctctgtccctgcgtccggaggcatgtagacccgcagctggtggggccgtgcatacccggggtcttgacttcgcctgcgatatctacatttgggcccctctggctggtacttgcggggtcctgctgctttcactcgtgatcactctttactgtaagcgcggtcggaagaagctgctgtacatctttaagcaacccttcatgaggcctgtgcagactactcaagaggaggacggctgttcatgccggttcccagaggaggaggaaggcggctgcgaactgcgcgtgaaattcagccgcagcgcagatgctccagcctacaagcaggggcagaaccagctctacaacgaactcaatcttggtcggagagaggagtacgacgtgctggacaagcggagaggacgggacccagaaatgggcgggaagccgcgcagaaagaatccccaagagggcctgtacaacgagctccaaaaggataagatggcagaagcctatagcgagattggtatgaaaggggaacgcagaagaggcaaaggccacgacggactgtaccagggactcagcaccgccaccaaggacacctatgacgctcttcacatgcaggccctgccgcctcgg

SEQ ID NO: 255-391 - skipped (137 entries)

SEQ ID NO: 392 - protein, 462 aa, Artificial Sequence
  source: /note="Description of Artificial Sequence: Synthetic polypeptide"
EVQLVESGGGLVQPGGSLRLSCAVSGFALSNHGMSWVRRAPGKGLEWVSGIVYSGSTYYAASVKGRFTISRDNSRNTLYLQMNSLRPEDTAIYYCSAHGGESDVWGQGTTVTVSSASGGGGSGGRASGGGGSDIQLTQSPSSLSASVGDRVTITCRASQSISSYLNWYQQKPGKAPKLLIYAASSLQSGVPSRFSGSGSGTDFTLTISSLQPEDFATYYCQQSYSTPYTFGQGTKVEIKTTTPAPRPPTPAPTIASQPLSLRPEACRPAAGGAVHTRGLDFACDIYIWAPLAGTCGVLLLSLVITLYCKRGRKKLLYIFKQPFMRPVQTTQEEDGCSCRFPEEEEGGCELRVKFSRSADAPAYKQGQNQLYNELNLGRREEYDVLDKRRGRDPEMGGKPRRKNPQEGLYNELQKDKMAEAYSEIGMKGERRRGKGHDGLYQGLSTATKDTYDALHMQALPPR

SEQ ID NO: 393 - protein, 445 aa, Artificial Sequence
  source: /note="Description of Artificial Sequence: Synthetic polypeptide"
EVQLVESGGGLVQPGGSLRLSCAVSGFALSNHGMSWVRRAPGKGLEWVSGIVYSGSTYYAASVKGRFTISRDNSRNTLYLQMNSLRPEDTAIYYCSAHGGESDVWGQGTTVTVSSDIQLTQSPSSLSASVGDRVTITCRASQSISSYLNWYQQKPGKAPKLLIYAASSLQSGVPSRFSGSGSGTDFTLTISSLQPEDFATYYCQQSYSTPYTFGQGTKVEIKTTTPAPRPPTPAPTIASQPLSLRPEACRPAAGGAVHTRGLDFACDIYIWAPLAGTCGVLLLSLVITLYCKRGRKKLLYIFKQPFMRPVQTTQEEDGCSCRFPEEEEGGCELRVKFSRSADAPAYKQGQNQLYNELNLGRREEYDVLDKRRGRDPEMGGKPRRKNPQEGLYNELQKDKMAEAYSEIGMKGERRRGKGHDGLYQGLSTATKDTYDALHMQALPPR

SEQ ID NO: 394-1008 - skipped (615 entries)

SEQ ID NO: 1009 - protein, 40 aa, Artificial Sequence
  source: /note="Description of Artificial Sequence: Synthetic polypeptide"
  SITE (1)..(40): /note="This sequence may encompass 1-10 'Gly Gly Gly Ser' repeating units"
GGGSGGGSGGGSGGGSGGGSGGGSGGGSGGGSGGGSGGGS

SEQ ID NO: 1010 - protein, 20 aa, Artificial Sequence
  source: /note="Description of Artificial Sequence: Synthetic peptide"
GGGGSGGGGSGGGGSGGGGS

SEQ ID NO: 1011 - protein, 15 aa, Artificial Sequence
  source: /note="Description of Artificial Sequence: Synthetic peptide"
GGGGSGGGGSGGGGS

SEQ ID NO: 1012 - protein, 4 aa, Artificial Sequence
  source: /note="Description of Artificial Sequence: Synthetic peptide"
GGGS

SEQ ID NO: 1013 - RNA, 5000 nt, Artificial Sequence
  source: /note="Description of Artificial Sequence: Synthetic polynucleotide"
  misc_feature (1)..(5000): /note="This sequence may encompass 50-5000 nucleotides"
  source: /note="See specification as filed for detailed description of substitutions and preferred embodiments"
aaaaaaaaaaaaaaaaaaaaaaaaaaaaaaaaaaaaaaaaaaaaaaaaaaaaaaaaaaaaaaaaaaaaaaaaaaaaaaaaaaaaaaaaaaaaaaaaaaaaaaaaaaaaaaaaaaaaaaaaaaaaaaaaaaaaaaaaaaaaaaaaaaaaaaaaaaaaaaaaaaaaaaaaaaaaaaaaaaaaaaaaaaaaaaaaaaaaaaaaaaaaaaaaaaaaaaaaaaaaaaaaaaaaaaaaaaaaaaaaaaaaaaaaaaaaaaaaaaaaaaaaaaaaaaaaaaaaaaaaaaaaaaaaaaaaaaaaaaaaaaaaaaaaaaaaaaaaaaaaaaaaaaaaaaaaaaaaaaaaaaaaaaaaaaaaaaaaaaaaaaaaaaaaaaaaaaaaaaaaaaaaaaaaaaaaaaaaaaaaaaaaaaaaaaaaaaaaaaaaaaaaaaaaaaaaaaaaaaaaaaaaaaaaaaaaaaaaaaaaaaaaaaaaaaaaaaaaaaaaaaaaaaaaaaaaaaaaaaaaaaaaaaaaaaaaaaaaaaaaaaaaaaaaaaaaaaaaaaaaaaaaaaaaaaaaaaaaaaaaaaaaaaaaaaaaaaaaaaaaaaaaaaaaaaaaaaaaaaaaaaaaaaaaaaaaaaaaaaaaaaaaaaaaaaaaaaaaaaaaaaaaaaaaaaaaaaaaaaaaaaaaaaaaaaaaaaaaaaaaaaaaaaaaaaaaaaaaaaaaaaaaaaaaaaaaaaaaaaaaaaaaaaaaaaaaaaaaaaaaaaaaaaaaaaaaaaaaaaaaaaaaaaaaaaaaaaaaaaaaaaaaaaaaaaaaaaaaaaaaaaaaaaaaaaaaaaaaaaaaaaaaaaaaaaaaaaaaaaaaaaaaaaaaaaaaaaaaaaaaaaaaaaaaaaaaaaaaaaaaaaaaaaaaaaaaaaaaaaaaaaaaaaaaaaaaaaaaaaaaaaaaaaaaaaaaaaaaaaaaaaaaaaaaaaaaaaaaaaaaaaaaaaaaaaaaaaaaaaaaaaaaaaaaaaaaaaaaaaaaaaaaaaaaaaaaaaaaaaaaaaaaaaaaaaaaaaaaaaaaaaaaaaaaaaaaaaaaaaaaaaaaaaaaaaaaaaaaaaaaaaaaaaaaaaaaaaaaaaaaaaaaaaaaaaaaaaaaaaaaaaaaaaaaaaaaaaaaaaaaaaaaaaaaaaaaaaaaaaaaaaaaaaaaaaaaaaaaaaaaaaaaaaaaaaaaaaaaaaaaaaaaaaaaaaaaaaaaaaaaaaaaaaaaaaaaaaaaaaaaaaaaaaaaaaaaaaaaaaaaaaaaaaaaaaaaaaaaaaaaaaaaaaaaaaaaaaaaaaaaaaaaaaaaaaaaaaaaaaaaaaaaaaaaaaaaaaaaaaaaaaaaaaaaaaaaaaaaaaaaaaaaaaaaaaaaaaaaaaaaaaaaaaaaaaaaaaaaaaaaaaaaaaaaaaaaaaaaaaaaaaaaaaaaaaaaaaaaaaaaaaaaaaaaaaaaaaaaaaaaaaaaaaaaaaaaaaaaaaaaaaaaaaaaaaaaaaaaaaaaaaaaaaaaaaaaaaaaaaaaaaaaaaaaaaaaaaaaaaaaaaaaaaaaaaaaaaaaaaaaaaaaaaaaaaaaaaaaaaaaaaaaaaaaaaaaaaaaaaaaaaaaaaaaaaaaaaaaaaaaaaaaaaaaaaaaaaaaaaaaaaaaaaaaaaaaaaaaaaaaaaaaaaaaaaaaaaaaaaaaaaaaaaaaaaaaaaaaaaaaaaaaaaaaaaaaaaaaaaaaaaaaaaaaaaaaaaaaaaaaaaaaaaaaaaaaaaaaaaaaaaaaaaaaaaaaaaaaaaaaaaaaaaaaaaaaaaaaaaaaaaaaaaaaaaaaaaaaaaaaaaaaaaaaaaaaaaaaaaaaaaaaaaaaaaaaaaaaaaaaaaaaaaaaaaaaaaaaaaaaaaaaaaaaaaaaaaaaaaaaaaaaaaaaaaaaaaaaaaaaaaaaaaaaaaaaaaaaaaaaaaaaaaaaaaaaaaaaaaaaaaaaaaaaaaaaaaaaaaaaaaaaaaaaaaaaaaaaaaaaaaaaaaaaaaaaaaaaaaaaaaaaaaaaaaaaaaaaaaaaaaaaaaaaaaaaaaaaaaaaaaaaaaaaaaaaaaaaaaaaaaaaaaaaaaaaaaaaaaaaaaaaaaaaaaaaaaaaaaaaaaaaaaaaaaaaaaaaaaaaaaaaaaaaaaaaaaaaaaaaaaaaaaaaaaaaaaaaaaaaaaaaaaaaaaaaaaaaaaaaaaaaaaaaaaaaaaaaaaaaaaaaaaaaaaaaaaaaaaaaaaaaaaaaaaaaaaaaaaaaaaaaaaaaaaaaaaaaaaaaaaaaaaaaaaaaaaaaaaaaaaaaaaaaaaaaaaaaaaaaaaaaaaaaaaaaaaaaaaaaaaaaaaaaaaaaaaaaaaaaaaaaaaaaaaaaaaaaaaaaaaaaaaaaaaaaaaaaaaaaaaaaaaaaaaaaaaaaaaaaaaaaaaaaaaaaaaaaaaaaaaaaaaaaaaaaaaaaaaaaaaaaaaaaaaaaaaaaaaaaaaaaaaaaaaaaaaaaaaaaaaaaaaaaaaaaaaaaaaaaaaaaaaaaaaaaaaaaaaaaaaaaaaaaaaaaaaaaaaaaaaaaaaaaaaaaaaaaaaaaaaaaaaaaaaaaaaaaaaaaaaaaaaaaaaaaaaaaaaaaaaaaaaaaaaaaaaaaaaaaaaaaaaaaaaaaaaaaaaaaaaaaaaaaaaaaaaaaaaaaaaaaaaaaaaaaaaaaaaaaaaaaaaaaaaaaaaaaaaaaaaaaaaaaaaaaaaaaaaaaaaaaaaaaaaaaaaaaaaaaaaaaaaaaaaaaaaaaaaaaaaaaaaaaaaaaaaaaaaaaaaaaaaaaaaaaaaaaaaaaaaaaaaaaaaaaaaaaaaaaaaaaaaaaaaaaaaaaaaaaaaaaaaaaaaaaaaaaaaaaaaaaaaaaaaaaaaaaaaaaaaaaaaaaaaaaaaaaaaaaaaaaaaaaaaaaaaaaaaaaaaaaaaaaaaaaaaaaaaaaaaaaaaaaaaaaaaaaaaaaaaaaaaaaaaaaaaaaaaaaaaaaaaaaaaaaaaaaaaaaaaaaaaaaaaaaaaaaaaaaaaaaaaaaaaaaaaaaaaaaaaaaaaaaaaaaaaaaaaaaaaaaaaaaaaaaaaaaaaaaaaaaaaaaaaaaaaaaaaaaaaaaaaaaaaaaaaaaaaaaaaaaaaaaaaaaaaaaaaaaaaaaaaaaaaaaaaaaaaaaaaaaaaaaaaaaaaaaaaaaaaaaaaaaaaaaaaaaaaaaaaaaaaaaaaaaaaaaaaaaaaaaaaaaaaaaaaaaaaaaaaaaaaaaaaaaaaaaaaaaaaaaaaaaaaaaaaaaaaaaaaaaaaaaaaaaaaaaaaaaaaaaaaaaaaaaaaaaaaaaaaaaaaaaaaaaaaaaaaaaaaaaaaaaaaaaaaaaaaaaaaaaaaaaaaaaaaaaaaaaaaaaaaaaaaaaaaaaaaaaaaaaaaaaaaaaaaaaaaaaaaaaaaaaaaaaaaaaaaaaaaaaaaaaaaaaaaaaaaaaaaaaaaaaaaaaaaaaaaaaaaaaaaaaaaaaaaaaaaaaaaaaaaaaaaaaaaaaaaaaaaaaaaaaaaaaaaaaaaaaaaaaaaaaaaaaaaaaaaaaaaaaaaaaaaaaaaaaaaaaaaaaaaaaaaaaaaaaaaaaaaaaaaaaaaaaaaaaaaaaaaaaaaaaaaaaaaaaaaaaaaaaaaaaaaaaaaaaaaaaaaaaaaaaaaaaaaaaaaaaaaaaaaaaaaaaaaaaaaaaaaaaaaaaaaaaaaaaaaaaaaaaaaaaaaaaaaaaaaaaaaaaaaaaaaaaaaaaaaaaaaaaaaaaaaaaaaaaaaaaaaaaaaaaaaaaaaaaaaaaaaaaaaaaaaaaaaaaaaaaaaaaaaaaaaaaaaaaaaaaaaaaaaaaaaaaaaaaaaaaaaaaaaaaaaaaaaaaaaaaaaaaaaaaaaaaaaaaaaaaaaaaaaaaaaaaaaaaaaaaaaaaaaaaaaaaaaaaaaaaaaaaaaaaaaaaaaaaaaaaaaaaaaaaaaaaaaaaaaaaaaaaaaaaaaaaaaaaaaaaaaaaaaaaaaaaaaaaaaaaaaaaaaaaaaaaaaaaaaaaaaaaaaaaaaaaaaaaaaaaaaaaaaaaaaaaaaaaaaaaaaaaaaaaaaaaaaaaaaaaaaaaaaaaaaaaaaaaaaaaaaaaaaaaaaaaaaaaaaaaaaaaaaaaaaaaaaaaaaaaaaaaaaaaaaaaaaaaaaaaaaaaaaaaaaaaaaaaaaaaaaaaaaaaaaaaaaaaaaaaaaaaaaaaaaaaaaaaaaaaaaaaaaaaaaaaaaaaaaaaaaaaaaaaaaaaaaaaaaaaaaaaaaaaaaaaaaaaaaaaaaaaaaaaaaaaaaaaaaaaaaaaaaaaaaaaaaaaaaaaaaaaaaaaaaaaaaaaaaaaaaaaaaaaaaaaaaaaaaaaaaaaaaaaaaaaaaaaaaaaaaaaaaaaaaaaaaaaaaaaaaaaaaaaaaaaaaaaaaaaaaaaaaaaaaaaaaaaaaaaaaaaaaaaaaaaaaaaaaaaaaaaaaaaaaaaaaaaaaaaaaaaaaaaaaaaaaaaaaaaaaaaaaaaaaaaaaaaaaaaaaaaaaaaaaaaaaaaaaaaaaaaaaaaaaaaaaaaaaaaaaaaaaaaaaaaaaaaaaaaaaaaaaaaaaaaaaaaaaaaaaaaaaaaaaaaaaaaaaaaaaaaaaaaaaaaaaaaaaaaaaaaaaaaaaaaaaaaaaaaaaaaaaaaaaaaaaaaaaaaaaaaaaaaaaaaaaaaaaaaaaaaaaaaaaaaaaaaaaaaaaaaaaaaaaaaaaaaaaaaaaaaaaaaaaaaaaaaaaaaaaaaaaaaaaaaaaaaaaaaaaaaaaaaaaaaaaaaaaaaaaaaaaaaaaaaaaaaaaaaaaaaaaaaaaaaaaaaaaaaaaaaaaaaaaaaaaaaaaaaaaaaaaaaaaaaaaaaaaaaaaaaaaaaaaaaaaaaaaaaaaaaaaaaaaaaaaaaaaaaaaaaaaaaaaaaaaaaaaaaaaaaaaaaaaaaaaaaaaaa

SEQ ID NO: 1014 - DNA, 1184 bp, Artificial Sequence
  source: /note="Description of Artificial Sequence: Synthetic polynucleotide"
cgtgaggctccggtgcccgtcagtgggcagagcgcacatcgcccacagtccccgagaagttggggggaggggtcggcaattgaaccggtgcctagagaaggtggcgcggggtaaactgggaaagtgatgtcgtgtactggctccgcctttttcccgagggtgggggagaaccgtatataagtgcagtagtcgccgtgaacgttctttttcgcaacgggtttgccgccagaacacaggtaagtgccgtgtgtggttcccgcgggcctggcctctttacgggttatggcccttgcgtgccttgaattacttccacctggctgcagtacgtgattcttgatcccgagcttcgggttggaagtgggtgggagagttcgaggccttgcgcttaaggagccccttcgcctcgtgcttgagttgaggcctggcctgggcgctggggccgccgcgtgcgaatctggtggcaccttcgcgcctgtctcgctgctttcgataagtctctagccatttaaaatttttgatgacctgctgcgacgctttttttctggcaagatagtcttgtaaatgcgggccaagatctgcacactggtatttcggtttttggggccgcgggcggcgacggggcccgtgcgtcccagcgcacatgttcggcgaggcggggcctgcgagcgcggccaccgagaatcggacgggggtagtctcaagctggccggcctgctctggtgcctggcctcgcgccgccgtgtatcgccccgccctgggcggcaaggctggcccggtcggcaccagttgcgtgagcggaaagatggccgcttcccggccctgctgcagggagctcaaaatggaggacgcggcgctcgggagagcgggcgggtgagtcacccacacaaaggaaaagggcctttccgtcctcagccgtcgcttcatgtgactccacggagtaccgggcgccgtccaggcacctcgattagttctcgagcttttggagtacgtcgtctttaggttggggggaggggttttatgcgatggagtttccccacactgagtgggtggagactgaagttaggccagcttggcacttgatgtaattctccttggaatttgccctttttgagtttggatcttggttcattctcaagcctcagacagtggttcaaagtttttttcttccatttcaggtgtcgtga

SEQ ID NO: 1015 - protein, 21 aa, Artificial Sequence
  source: /note="Description of Artificial Sequence: Synthetic peptide"
MALPVTALLLPLALLLHAARP

SEQ ID NO: 1016 - DNA, 63 bp, Artificial Sequence
  source: /note="Description of Artificial Sequence: Synthetic oligonucleotide"
atggccctgcctgtgacagccctgctgctgcctctggctctgctgctgcatgccgctagaccc

SEQ ID NO: 1017 - DNA, 63 bp, Artificial Sequence
  source: /note="Description of Artificial Sequence: Synthetic oligonucleotide"
atggccctccctgtcaccgccctgctgcttccgctggctcttctgctccacgccgctcggccc

SEQ ID NO: 1018 - protein, 45 aa, Artificial Sequence
  source: /note="Description of Artificial Sequence: Synthetic polypeptide"
TTTPAPRPPTPAPTIASQPLSLRPEACRPAAGGAVHTRGLDFACD

SEQ ID NO: 1019 - DNA, 135 bp, Artificial Sequence
  source: /note="Description of Artificial Sequence: Synthetic polynucleotide"
accacgacgccagcgccgcgaccaccaacaccggcgcccaccatcgcgtcgcagcccctgtccctgcgcccagaggcgtgccggccagcggcggggggcgcagtgcacacgagggggctggacttcgcctgtgat

SEQ ID NO: 1020 - protein, 230 aa, Artificial Sequence
  source: /note="Description of Artificial Sequence: Synthetic polypeptide"
ESKYGPPCPPCPAPEFLGGPSVFLFPPKPKDTLMISRTPEVTCVVVDVSQEDPEVQFNWYVDGVEVHNAKTKPREEQFNSTYRVVSVLTVLHQDWLNGKEYKCKVSNKGLPSSIEKTISKAKGQPREPQVYTLPPSQEEMTKNQVSLTCLVKGFYPSDIAVEWESNGQPENNYKTTPPVLDSDGSFFLYSRLTVDKSRWQEGNVFSCSVMHEALHNHYTQKSLSLSLGKM

SEQ ID NO: 1021 - DNA, 690 bp, Artificial Sequence
  source: /note="Description of Artificial Sequence: Synthetic polynucleotide"
gagagcaagtacggccctccctgccccccttgccctgcccccgagttcctgggcggacccagcgtgttcctgttcccccccaagcccaaggacaccctgatgatcagccggacccccgaggtgacctgtgtggtggtggacgtgtcccaggaggaccccgaggtccagttcaactggtacgtggacggcgtggaggtgcacaacgccaagaccaagccccgggaggagcagttcaatagcacctaccgggtggtgtccgtgctgaccgtgctgcaccaggactggctgaacggcaaggaatacaagtgtaaggtgtccaacaagggcctgcccagcagcatcgagaaaaccatcagcaaggccaagggccagcctcgggagccccaggtgtacaccctgccccctagccaagaggagatgaccaagaaccaggtgtccctgacctgcctggtgaagggcttctaccccagcgacatcgccgtggagtgggagagcaacggccagcccgagaacaactacaagaccaccccccctgtgctggacagcgacggcagcttcttcctgtacagccggctgaccgtggacaagagccggtggcaggagggcaacgtctttagctgctccgtgatgcacgaggccctgcacaaccactacacccagaagagcctgagcctgtccctgggcaagatg

SEQ ID NO: 1022 - protein, 282 aa, Artificial Sequence
  source: /note="Description of Artificial Sequence: Synthetic polypeptide"
RWPESPKAQASSVPTAQPQAEGSLAKATTAPATTRNTGRGGEEKKKEKEKEEQEERETKTPECPSHTQPLGVYLLTPAVQDLWLRDKATFTCFVVGSDLKDAHLTWEVAGKVPTGGVEEGLLERHSNGSQSQHSRLTLPRSLWNAGTSVTCTLNHPSLPPQRLMALREPAAQAPVKLSLNLLASSDPPEAASWLLCEVSGFSPPNILLMWLEDQREVNTSGFAPARPPPQPGSTTFWAWSVLRVPAPPSPQPATYTCVVSHEDSRTLLNASRSLEVSYVTDH

SEQ ID NO: 1023 - DNA, 847 bp, Artificial Sequence
  source: /note="Description of Artificial Sequence: Synthetic polynucleotide"
aggtggcccgaaagtcccaaggcccaggcatctagtgttcctactgcacagccccaggcagaaggcagcctagccaaagctactactgcacctgccactacgcgcaatactggccgtggcggggaggagaagaaaaaggagaaagagaaagaagaacaggaagagagggagaccaagacccctgaatgtccatcccatacccagccgctgggcgtctatctcttgactcccgcagtacaggacttgtggcttagagataaggccacctttacatgtttcgtcgtgggctctgacctgaaggatgcccatttgacttgggaggttgccggaaaggtacccacagggggggttgaggaagggttgctggagcgccattccaatggctctcagagccagcactcaagactcacccttccgagatccctgtggaacgccgggacctctgtcacatgtactctaaatcatcctagcctgcccccacagcgtctgatggcccttagagagccagccgcccaggcaccagttaagcttagcctgaatctgctcgccagtagtgatcccccagaggccgccagctggctcttatgcgaagtgtccggctttagcccgcccaacatcttgctcatgtggctggaggaccagcgagaagtgaacaccagcggcttcgctccagcccggcccccaccccagccgggttctaccacattctgggcctggagtgtcttaagggtcccagcaccacctagcccccagccagccacatacacctgtgttgtgtcccatgaagatagcaggaccctgctaaatgcttctaggagtctggaggtttcctacgtgactgaccatt

SEQ ID NO: 1024 - protein, 10 aa, Artificial Sequence
  source: /note="Description of Artificial Sequence: Synthetic peptide"
GGGGSGGGGS

SEQ ID NO: 1025 - DNA, 30 bp, Artificial Sequence
  source: /note="Description of Artificial Sequence: Synthetic oligonucleotide"
ggtggcggaggttctggaggtggaggttcc

SEQ ID NO: 1026 - protein, 24 aa, Artificial Sequence
  source: /note="Description of Artificial Sequence: Synthetic peptide"
IYIWAPLAGTCGVLLLSLVITLYC

SEQ ID NO: 1027 - DNA, 72 bp, Artificial Sequence
  source: /note="Description of Artificial Sequence: Synthetic oligonucleotide"
atctacatctgggcgcccttggccgggacttgtggggtccttctcctgtcactggttatcaccctttactgc

SEQ ID NO: 1028 - DNA, 72 bp, Artificial Sequence
  source: /note="Description of Artificial Sequence: Synthetic oligonucleotide"
atctacatttgggcccctctggctggtacttgcggggtcctgctgctttcactcgtgatcactctttactgt

SEQ ID NO: 1029 - protein, 42 aa, Artificial Sequence
  source: /note="Description of Artificial Sequence: Synthetic polypeptide"
KRGRKKLLYIFKQPFMRPVQTTQEEDGCSCRFPEEEEGGCEL

SEQ ID NO: 1030 - DNA, 126 bp, Artificial Sequence
  source: /note="Description of Artificial Sequence: Synthetic polynucleotide"
aaacggggcagaaagaaactcctgtatatattcaaacaaccatttatgagaccagtacaaactactcaagaggaagatggctgtagctgccgatttccagaagaagaagaaggaggatgtgaactg

SEQ ID NO: 1031 - DNA, 126 bp, Artificial Sequence
  source: /note="Description of Artificial Sequence: Synthetic polynucleotide"
aagcgcggtcggaagaagctgctgtacatctttaagcaacccttcatgaggcctgtgcagactactcaagaggaggacggctgttcatgccggttcccagaggaggaggaaggcggctgcgaactg

SEQ ID NO: 1032 - protein, 48 aa, Artificial Sequence
  source: /note="Description of Artificial Sequence: Synthetic polypeptide"
QRRKYRSNKGESPVEPAEPCRYSCPREEEGSTIPIQEDYRKPEPACSP

SEQ ID NO: 1033 - DNA, 123 bp, Artificial Sequence
  source: /note="Description of Artificial Sequence: Synthetic polynucleotide"
aggagtaagaggagcaggctcctgcacagtgactacatgaacatgactccccgccgccccgggcccacccgcaagcattaccagccctatgccccaccacgcgacttcgcagcctatcgctcc

SEQ ID NO: 1034 - protein, 112 aa, Artificial Sequence
  source: /note="Description of Artificial Sequence: Synthetic polypeptide"
RVKFSRSADAPAYKQGQNQLYNELNLGRREEYDVLDKRRGRDPEMGGKPRRKNPQEGLYNELQKDKMAEAYSEIGMKGERRRGKGHDGLYQGLSTATKDTYDALHMQALPPR

SEQ ID NO: 1035 - DNA, 336 bp, Artificial Sequence
  source: /note="Description of Artificial Sequence: Synthetic polynucleotide"
agagtgaagttcagcaggagcgcagacgcccccgcgtacaagcagggccagaaccagctctataacgagctcaatctaggacgaagagaggagtacgatgttttggacaagagacgtggccgggaccctgagatggggggaaagccgagaaggaagaaccctcaggaaggcctgtacaatgaactgcagaaagataagatggcggaggcctacagtgagattgggatgaaaggcgagcgccggaggggcaaggggcacgatggcctttaccagggtctcagtacagccaccaaggacacctacgacgcccttcacatgcaggccctgccccctcgc

SEQ ID NO: 1036 - DNA, 336 bp, Artificial Sequence
  source: /note="Description of Artificial Sequence: Synthetic polynucleotide"
cgcgtgaaattcagccgcagcgcagatgctccagcctacaagcaggggcagaaccagctctacaacgaactcaatcttggtcggagagaggagtacgacgtgctggacaagcggagaggacgggacccagaaatgggcgggaagccgcgcagaaagaatccccaagagggcctgtacaacgagctccaaaaggataagatggcagaagcctatagcgagattggtatgaaaggggaacgcagaagaggcaaaggccacgacggactgtaccagggactcagcaccgccaccaaggacacctatgacgctcttcacatgcaggccctgccgcctcgg

SEQ ID NO: 1037 - protein, 112 aa, Artificial Sequence
  source: /note="Description of Artificial Sequence: Synthetic polypeptide"
RVKFSRSADAPAYQQGQNQLYNELNLGRREEYDVLDKRRGRDPEMGGKPRRKNPQEGLYNELQKDKMAEAYSEIGMKGERRRGKGHDGLYQGLSTATKDTYDALHMQALPPR

SEQ ID NO: 1038 - DNA, 336 bp, Artificial Sequence
  source: /note="Description of Artificial Sequence: Synthetic polynucleotide"
agagtgaagttcagcaggagcgcagacgcccccgcgtaccagcagggccagaaccagctctataacgagctcaatctaggacgaagagaggagtacgatgttttggacaagagacgtggccgggaccctgagatggggggaaagccgagaaggaagaaccctcaggaaggcctgtacaatgaactgcagaaagataagatggcggaggcctacagtgagattgggatgaaaggcgagcgccggaggggcaaggggcacgatggcctttaccagggtctcagtacagccaccaaggacacctacgacgcccttcacatgcaggccctgccccctcgc

SEQ ID NO: 1039 - protein, 5 aa, Artificial Sequence
  source: /note="Description of Artificial Sequence: Synthetic peptide"
GGGGS

SEQ ID NO: 1040 - DNA, 30 bp, Artificial Sequence; identical to SEQ ID NO: 1025
  source: /note="Description of Artificial Sequence: Synthetic oligonucleotide"

SEQ ID NO: 1041 - protein, 150 aa, Artificial Sequence [sequence omitted]

SEQ ID NO: 1042 - DNA, 450 bp, Artificial Sequence
  source: /note="Description of Artificial Sequence: Synthetic polynucleotide"
cccggatggtttctggactctccggatcgcccgtggaatcccccaaccttctcaccggcactcttggttgtgactgagggcgataatgcgaccttcacgtgctcgttctccaacacctccgaatcattcgtgctgaactggtaccgcatgagcccgtcaaaccagaccgacaagctcgccgcgtttccggaagatcggtcgcaaccgggacaggattgtcggttccgcgtgactcaactgccgaatggcagagacttccacatgagcgtggtccgcgctaggcgaaacgactccgggacctacctgtgcggagccatctcgctggcgcctaaggcccaaatcaaagagagcttgagggccgaactgagagtgaccgagcgcagagctgaggtgccaactgcacatccatccccatcgcctcggcctgcggggcagtttcagaccctggtc

SEQ ID NO: 1043 - protein, 394 aa, Artificial Sequence
  source: /note="Description of Artificial Sequence: Synthetic polypeptide"
MALPVTALLLPLALLLHAARPPGWFLDSPDRPWNPPTFSPALLVVTEGDNATFTCSFSNTSESFVLNWYRMSPSNQTDKLAAFPEDRSQPGQDCRFRVTQLPNGRDFHMSVVRARRNDSGTYLCGAISLAPKAQIKESLRAELRVTERRAEVPTAHPSPSPRPAGQFQTLVTTTPAPRPPTPAPTIASQPLSLRPEACRPAAGGAVHTRGLDFACDIYIWAPLAGTCGVLLLSLVITLYCKRGRKKLLYIFKQPFMRPVQTTQEEDGCSCRFPEEEEGGCELRVKFSRSADAPAYKQGQNQLYNELNLGRREEYDVLDKRRGRDPEMGGKPRRKNPQEGLYNELQKDKMAEAYSEIGMKGERRRGKGHDGLYQGLSTATKDTYDALHMQALPPR

SEQ ID NO: 1044 - DNA, 1182 bp, Artificial Sequence
  source: /note="Description of Artificial Sequence: Synthetic polynucleotide"
atggccctccctgtcactgccctgcttctccccctcgcactcctgctccacgccgctagaccacccggatggtttctggactctccggatcgcccgtggaatcccccaaccttctcaccggcactcttggttgtgactgagggcgataatgcgaccttcacgtgctcgttctccaacacctccgaatcattcgtgctgaactggtaccgcatgagcccgtcaaaccagaccgacaagctcgccgcgtttccggaagatcggtcgcaaccgggacaggattgtcggttccgcgtgactcaactgccgaatggcagagacttccacatgagcgtggtccgcgctaggcgaaacgactccgggacctacctgtgcggagccatctcgctggcgcctaaggcccaaatcaaagagagcttgagggccgaactgagagtgaccgagcgcagagctgaggtgccaactgcacatccatccccatcgcctcggcctgcggggcagtttcagaccctggtcacgaccactccggcgccgcgcccaccgactccggccccaactatcgcgagccagcccctgtcgctgaggccggaagcatgccgccctgccgccggaggtgctgtgcatacccggggattggacttcgcatgcgacatctacatttgggctcctctcgccggaacttgtggcgtgctccttctgtccctggtcatcaccctgtactgcaagcggggtcggaaaaagcttctgtacattttcaagcagcccttcatgaggcccgtgcaaaccacccaggaggaggacggttgctcctgccggttccccgaagaggaagaaggaggttgcgagctgcgcgtgaagttctcccggagcgccgacgcccccgcctataagcagggccagaaccagctgtacaacgaactgaacctgggacggcgggaagagtacgatgtgctggacaagcggcgcggccgggaccccgaaatgggcgggaagcctagaagaaagaaccctcaggaaggcctgtataacgagctgcagaaggacaagatggccgaggcctactccgaaattgggatgaagggagagcggcggaggggaaaggggcacgacggcctgtaccaaggactgtccaccgccaccaaggacacatacgatgccctgcacatgcaggcccttccccctcgc

SEQ ID NO: 1045 - protein, 17 aa, Artificial Sequence
  source: /note="Description of Artificial Sequence: Synthetic peptide"
ASGGGGSGGRASGGGGS

SEQ ID NO: 1046 - protein, 373 aa, Artificial Sequence
  source: /note="Description of Artificial Sequence: Synthetic polypeptide"
PGWFLDSPDRPWNPPTFSPALLVVTEGDNATFTCSFSNTSESFVLNWYRMSPSNQTDKLAAFPEDRSQPGQDCRFRVTQLPNGRDFHMSVVRARRNDSGTYLCGAISLAPKAQIKESLRAELRVTERRAEVPTAHPSPSPRPAGQFQTLVTTTPAPRPPTPAPTIASQPLSLRPEACRPAAGGAVHTRGLDFACDIYIWAPLAGTCGVLLLSLVITLYCKRGRKKLLYIFKQPFMRPVQTTQEEDGCSCRFPEEEEGGCELRVKFSRSADAPAYKQGQNQLYNELNLGRREEYDVLDKRRGRDPEMGGKPRRKNPQEGLYNELQKDKMAEAYSEIGMKGERRRGKGHDGLYQGLSTATKDTYDALHMQALPPR

SEQ ID NO: 1047 - protein, 35 aa, Artificial Sequence
  source: /note="Description of Artificial Sequence: Synthetic polypeptide"
TKKKYSSSVHDPNGEYMFMRAVNTAKKSRLTDVTL

SEQ ID NO: 1048 - DNA, 105 bp, Artificial Sequence
  source: /note="Description of Artificial Sequence: Synthetic polynucleotide"
acaaaaaagaagtattcatccagtgtgcacgaccctaacggtgaatacatgttcatgagagcagtgaacacagccaaaaaatccagactcacagatgtgacccta

SEQ ID NO: 1049 - protein, 69 aa, Artificial Sequence
  source: /note="Description of Artificial Sequence: Synthetic polypeptide"
TTTPAPRPPTPAPTIASQPLSLRPEACRPAAGGAVHTRGLDFACDFWLPIGCAAFVVVCILGCILICWL

SEQ ID NO: 1050 - DNA, 207 bp, Artificial Sequence
  source: /note="Description of Artificial Sequence: Synthetic polynucleotide"
accacgacgccagcgccgcgaccaccaacaccggcgcccaccatcgcgtcgcagcccctgtccctgcgcccagaggcgtgccggccagcggcggggggcgcagtgcacacgagggggctggacttcgcctgtgatttctggttacccataggatgtgcagcctttgttgtagtctgcattttgggatgcatacttatttgttggctt

SEQ ID NO: 1051 - protein, 41 aa, Artificial Sequence
  source: /note="Description of Artificial Sequence: Synthetic polypeptide"
RSKRSRLLHSDYMNMTPRRPGPTRKHYQPYAPPRDFAAYRS

SEQ ID NO: 1052 - DNA, 123 bp, Artificial Sequence; identical to SEQ ID NO: 1033
  source: /note="Description of Artificial Sequence: Synthetic polynucleotide"

SEQ ID NO: 1053 - protein, 486 aa, Artificial Sequence
  source: /note="Description of Artificial Sequence: Synthetic polypeptide"
  SITE (1)..(21): /note="This region may or may not be present"
  source: /note="See specification as filed for detailed description of substitutions and preferred embodiments"
MALPVTALLLPLALLLHAARPDIQMTQTTSSLSASLGDRVTISCRASQDISKYLNWYQQKPDGTVKLLIYHTSRLHSGVPSRFSGSGSGTDYSLTISNLEQEDIATYFCQQGNTLPYTFGGGTKLEITGGGGSGGGGSGGGGSEVKLQESGPGLVAPSQSLSVTCTVSGVSLPDYGVSWIRQPPRKGLEWLGVIWGSETTYYNSALKSRLTIIKDNSKSQVFLKMNSLQTDDTAIYYCAKHYYYGGSYAMDYWGQGTSVTVSSTTTPAPRPPTPAPTIASQPLSLRPEACRPAAGGAVHTRGLDFACDIYIWAPLAGTCGVLLLSLVITLYCKRGRKKLLYIFKQPFMRPVQTTQEEDGCSCRFPEEEEGGCELRVKFSRSADAPAYKQGQNQLYNELNLGRREEYDVLDKRRGRDPEMGGKPRRKNPQEGLYNELQKDKMAEAYSEIGMKGERRRGKGHDGLYQGLSTATKDTYDALHMQALPPR

SEQ ID NO: 1054 - protein, 465 aa, Artificial Sequence; identical to SEQ ID NO: 26
  source: /note="Description of Artificial Sequence: Synthetic polypeptide"

SEQ ID NO: 1055 - protein, 486 aa, Artificial Sequence; identical to SEQ ID NO: 1053
  source: /note="Description of Artificial Sequence: Synthetic polypeptide"

SEQ ID NO: 1056 - DNA, 1458 bp, Artificial Sequence
  source: /note="Description of Artificial Sequence: Synthetic polynucleotide"
atggccttaccagtgaccgccttgctcctgccgctggccttgctgctccacgccgccaggccggacatccagatgacacagactacatcctccctgtctgcctctctgggagacagagtcaccatcagttgcagggcaagtcaggacattagtaaatatttaaattggtatcagcagaaaccagatggaactgttaaactcctgatctaccatacatcaagattacactcaggagtcccatcaaggttcagtggcagtgggtctggaacagattattctctcaccattagcaacctggagcaagaagatattgccacttacttttgccaacagggtaatacgcttccgtacacgttcggaggggggaccaagctggagatcacaggtggcggtggctcgggcggtggtgggtcgggtggcggcggatctgaggtgaaactgcaggagtcaggacctggcctggtggcgccctcacagagcctgtccgtcacatgcactgtctcaggggtctcattacccgactatggtgtaagctggattcgccagcctccacgaaagggtctggagtggctgggagtaatatggggtagtgaaaccacatactataattcagctctcaaatccagactgaccatcatcaaggacaactccaagagccaagttttcttaaaaatgaacagtctgcaaactgatgacacagccatttactactgtgccaaacattattactacggtggtagctatgctatggactactggggccaaggaacctcagtcaccgtctcctcaaccacgacgccagcgccgcgaccaccaacaccggcgcccaccatcgcgtcgcagcccctgtccctgcgcccagaggcgtgccggccagcggcggggggcgcagtgcacacgagggggctggacttcgcctgtgatatctacatctgggcgcccttggccgggacttgtggggtccttctcctgtcactggttatcaccctttactgcaaacggggcagaaagaaactcctgtatatattcaaacaaccatttatgagaccagtacaaactactcaagaggaagatggctgtagctgccgatttccagaagaagaagaaggaggatgtgaactgagagtgaagttcagcaggagcgcagacgcccccgcgtacaagcagggccagaaccagctctataacgagctcaatctaggacgaagagaggagtacgatgttttggacaagagacgtggccgggaccctgagatggggggaaagccgagaaggaagaaccctcaggaaggcctgtacaatgaactgcagaaagataagatggcggaggcctacagtgagattgggatgaaaggcgagcgccggaggggcaaggggcacgatggcctttaccagggtctcagtacagccaccaaggacacctacgacgcccttcacatgcaggccctgccccctcgc

SEQ ID NO: 1057 - protein, 242 aa, Artificial Sequence; identical to SEQ ID NO: 15
  source: /note="Description of Artificial Sequence: Synthetic polypeptide"

SEQ ID NO: 1058 - protein, 244 aa, Artificial Sequence
  source: /note="Description of Artificial Sequence: Synthetic polypeptide"
QVQLLESGAELVRPGSSVKISCKASGYAFSSYWMNWVKQRPGQGLEWIGQIYPGDGDTNYNGKFKGQATLTADKSSSTAYMQLSGLTSEDSAVYSCARKTISSVVDFYFDYWGQGTTVTGGGSGGGSGGGSGGGSELVLTQSPKFMSTSVGDRVSVTCKASQNVGTNVAWYQQKPGQSPKPLIYSATYRNSGVPDRFTGSGSGTDFTLTITNVQSKDLADYFCQYNRYPYTSFFFTKLEIKRRS

SEQ ID NO: 1059 - protein, 464 aa, Artificial Sequence
  source: /note="Description of Artificial Sequence: Synthetic polypeptide"
QVQLLESGAELVRPGSSVKISCKASGYAFSSYWMNWVKQRPGQGLEWIGQIYPGDGDTNYNGKFKGQATLTADKSSSTAYMQLSGLTSEDSAVYSCARKTISSVVDFYFDYWGQGTTVTGGGSGGGSGGGSGGGSELVLTQSPKFMSTSVGDRVSVTCKASQNVGTNVAWYQQKPGQSPKPLIYSATYRNSGVPDRFTGSGSGTDFTLTITNVQSKDLADYFCQYNRYPYTSFFFTKLEIKRRSKIEVMYPPPYLDNEKSNGTIIHVKGKHLCPSPLFPGPSKPFWVLVVVGGVLACYSLLVTVAFIIFWVRSKRSRLLHSDYMNMTPRRPGPTRKHYQPYAPPRDFAAYRSRVKFSRSADAPAYQQGQNQLYNELNLGRREEYDVLDKRRGRDPEMGGKPRRKNPQEGLYNELQKDKMAEAYSEIGMKGERRRGKGHDGLYQGLSTATKDTYDALHMQALPPR

SEQ ID NO: 1060 - protein, 246 aa, Artificial Sequence
  source: /note="Description of Artificial Sequence: Synthetic polypeptide"
DIQMTQTTSSLSASLGDRVTISCRASQDISKYLNWYQQKPDGTVKLLIYHTSRLHSGVPSRFSGSGSGTDYSLTISNLEQEDIATYFCQQGNTLPYTFGGGTKLEITGSTSGSGKPGSGEGSTKGEVKLQESGPGLVAPSQSLSVTCTVSGVSLPDYGVSWIRQPPRKGLEWLGVIWGSETTYYNSALKSRLTIIKDNSKSQVFLKMNSLQTDDTAIYYCAKHYYYGGSYAMDYWGQGTSVTVSSE

SEQ ID NO: 1061 - protein, 439 aa, Artificial Sequence
  source: /note="Description of Artificial Sequence: Synthetic polypeptide"
DIQMTQTTSSLSASLGDRVTISCRASQDISKYLNWYQQKPDGTVKLLIYHTSRLHSGVPSRFSGSGSGTDYSLTISNLEQEDIATYFCQQGNTLPYTFGGGTKLEITGSTSGSGKPGSGEGSTKGEVKLQESGPGLVAPSQSLSVTCTVSGVSLPDYGVSWIRQPPRKGLEWLGVIWGSETTYYNSALKSRLTIIKDNSKSQVFLKMNSLQTDDTAIYYCAKHYYYGGSYAMDYWGQGTSVTVSSESKYGPPCPPCPMFWVLVVVGGVLACYSLLVTVAFIIFWVKRGRKKLLYIFKQPFMRPVQTTQEEDGCSCRFEEEEGGCELRVKFSRSADAPAYQQGQNQLYNELNLGRREEYDVLDKRRGRDPEMGGKPRRKNPQEGLYNELQKDKMAEAYSEIGMKGERRRGKGHDGLYQGLSTATKDTYDALHMQALPPRL

SEQ ID NO: 1062 - protein, 819 aa, Artificial Sequence
  source: /note="Description of Artificial Sequence: Synthetic polypeptide"
DIQMTQTTSSLSASLGDRVTISCRASQDISKYLNWYQQKPDGTVKLLIYHTSRLHSGVPSRFSGSGSGTDYSLTISNLEQEDIATYFCQQGNTLPYTFGGGTKLEITGSTSGSGKPGSGEGSTKGEVKLQESGPGLVAPSQSLSVTCTVSGVSLPDYGVSWIRQPPRKGLEWLGVIWGSETTYYNSALKSRLTIIKDNSKSQVFLKMNSLQTDDTAIYYCAKHYYYGGSYAMDYWGQGTSVTVSSESKYGPPCPPCPMFWVLVVVGGVLACYSLLVTVAFIIFWVKRGRKKLLYIFKQPFMRPVQTTQEEDGCSCRFEEEEGGCELRVKFSRSADAPAYQQGQNQLYNELNLGRREEYDVLDKRRGRDPEMGGKPRRKNPQEGLYNELQKDKMAEAYSEIGMKGERRRGKGHDGLYQGLSTATKDTYDALHMQALPPRLEGGGEGRGSLLTCGDVEENPGPRMLLLVTSLLLCELPHPAFLLIPRKVCNGIGIGEFKDSLSINATNIKHFKNCTSISGDLHILPVAFRGDSFTHTPPLDPQELDILKTVKEITGFLLIQAWPENRTDLHAFENLEIIRGRTKQHGQFSLAVVSLNITSLGLRSLKEISDGDVIISGNKNLCYANTINWKKLFGTSGQKTKIISNRGENSCKATGQVCHALCSPEGCWGPEPRDCVSCRNVSRGRECVDKCNLLEGEPREFVENSECIQCHPECLPQAMNITCTGRGPDNCIQCAHYIDGPHCVKTCPAGVMGENNTLVWKYADAGHVCHLCHPNCTYGCTGPGLEGCPTNGPKIPSIATGMVGALLLLLVVALGIGLFM

SEQ ID NO: 1063 - protein, 245 aa, Artificial Sequence
  source: /note="Description of Artificial Sequence: Synthetic polypeptide"
DIQMTQTTSSLSASLGDRVTISCRASQDISKYLNWYQQKPDGTVKLLIYHTSRLHSGVPSRFSGSGSGTDYSLTISNLEQEDIATYFCQQGNTLPYTFGGGTKLEITGSTSGSGKPGSGEGSTKGEVKLQESGPGLVAPSQSLSVTCTVSGVSLPDYGVSWIRQPPRKGLEWLGVIWGSETTYYNSALKSRLTIIKDNSKSQVFLKMNSLQTDDTAIYYCAKHYYYGGSYAMDYWGQGTSVTVSS

SEQ ID NO: 1064 - protein, 467 aa, Artificial Sequence
  source: /note="Description of Artificial Sequence: Synthetic polypeptide"
DIQMTQTTSSLSASLGDRVTISCRASQDISKYLNWYQQKPDGTVKLLIYHTSRLHSGVPSRFSGSGSGTDYSLTISNLEQEDIATYFCQQGNTLPYTFGGGTKLEITGSTSGSGKPGSGEGSTKGEVKLQESGPGLVAPSQSLSVTCTVSGVSLPDYGVSWIRQPPRKGLEWLGVIWGSETTYYNSALKSRLTIIKDNSKSQVFLKMNSLQTDDTAIYYCAKHYYYGGSYAMDYWGQGTSVTVSSAAAIEVMYPPPYLDNEKSNGTIIHVKGKHLCPSPLFPGPSKPFWVLVVVGGVLACYSLLVTVAFIIFWVRSKRSRLLHSDYMNMTPRRPGPTRKHYQPYAPPRDFAAYRSRVKFSRSADAPAYQQGQNQLYNELNLGRREEYDVLDKRRGRDPEMGGKPRRKNPQEGLYNELQKDKMAEAYSEIGMKGERRRGKGHDGLYQGLSTATKDTYDALHMQALPPR

SEQ ID NO: 1065 - protein, 119 aa, Artificial Sequence
  source: /note="Description of Artificial Sequence: Synthetic polypeptide"
QVQLLESGAELVRPGSSVKISCKASGYAFSSYWMNWVKQRPGQGLEWIGQIYPGDGDTNYNGKFKGQATLTADKSSSTAYMQLSGLTSEDSAVYSCARKTISSVVDFYFDYWGQGTTVT

SEQ ID NO: 1066 - protein, 111 aa, Artificial Sequence
  source: /note="Description of Artificial Sequence: Synthetic polypeptide"
ELVLTQSPKFMSTSVGDRVSVTCKASQNVGTNVAWYQQKPGQSPKPLIYSATYRNSGVPDRFTGSGSGTDFTLTITNVQSKDLADYFYFCQYNRYPYTSGGGTKLEIKRRS

SEQ ID NO: 1067 - protein, 242 aa, Artificial Sequence
  source: /note="Description of Artificial Sequence: Synthetic polypeptide"
EIVMTQSPATLSLSPGERATLSCRASQDISKYLNWYQQKPGQAPRLLIYHTSRLHSGIPARFSGSGSGTDYTLTISSLQPEDFAVYFCQQGNTLPYTFGQGTKLEIKGGGGSGGGGSGGGGSQVQLQESGPGLVKPSETLSLTCTVSGVSLPDYGVSWIRQPPGKGLEWIGVIWGSETTYYSSSLKSRVTISKDNSKNQVSLKLSSVTAADTAVYYCAKHYYYGGSYAMDYWGQGTLVTVSS

SEQ ID NO: 1068 - protein, 486 aa, Artificial Sequence
  source: /note="Description of Artificial Sequence: Synthetic polypeptide"
MALPVTALLLPLALLLHAARPEIVMTQSPATLSLSPGERATLSCRASQDISKYLNWYQQKPGQAPRLLIYHTSRLHSGIPARFSGSGSGTDYTLTISSLQPEDFAVYFCQQGNTLPYTFGQGTKLEIKGGGGSGGGGSGGGGSQVQLQESGPGLVKPSETLSLTCTVSGVSLPDYGVSWIRQPPGKGLEWIGVIWGSETTYYSSSLKSRVTISKDNSKNQVSLKLSSVTAADTAVYYCAKHYYYGGSYAMDYWGQGTLVTVSSTTTPAPRPPTPAPTIASQPLSLRPEACRPAAGGAVHTRGLDFACDIYIWAPLAGTCGVLLLSLVITLYCKRGRKKLLYIFKQPFMRPVQTTQEEDGCSCRFPEEEEGGCELRVKFSRSADAPAYKQGQNQLYNELNLGRREEYDVLDKRRGRDPEMGGKPRRKNPQEGLYNELQKDKMAEAYSEIGMKGERRRGKGHDGLYQGLSTATKDTYDALHMQALPPR

SEQ ID NO: 1069 - protein, 242 aa, Artificial Sequence
  source: /note="Description of Artificial Sequence: Synthetic polypeptide"
EIVMTQSPATLSLSPGERATLSCRASQDISKYLNWYQQKPGQAPRLLIYHTSRLHSGIPARFSGSGSGTDYTLTISSLQPEDFAVYFCQQGNTLPYTFGQGTKLEIKGGGGSGGGGSGGGGSQVQLQESGPGLVKPSETLSLTCTVSGVSLPDYGVSWIRQPPGKGLEWIGVIWGSETTYYQSSLKSRVTISKDNSKNQVSLKLSSVTAADTAVYYCAKHYYYGGSYAMDYWGQGTLVTVSS

SEQ ID NO: 1070 - DNA, 813 bp, Artificial Sequence
  source: /note="Description of Artificial Sequence: Synthetic polynucleotide"
atggccctccctgtcaccgccctgctgcttccgctggctcttctgctccacgccgctcggcccgaaattgtgatgacccagtcacccgccactcttagcctttcacccggtgagcgcgcaaccctgtcttgcagagcctcccaagacatctcaaaataccttaattggtatcaacagaagcccggacaggctcctcgccttctgatctaccacaccagccggctccattctggaatccctgccaggttcagcggtagcggatctgggaccgactacaccctcactatcagctcactgcagccagaggacttcgctgtctatttctgtcagcaagggaacaccctgccctacacctttggacagggcaccaagctcgagattaaaggtggaggtggcagcggaggaggtgggtccggcggtggaggaagccaggtccaactccaagaaagcggaccgggtcttgtgaagccatcagaaactctttcactgacttgtactgtgagcggagtgtctctccccgattacggggtgtcttggatcagacagccaccggggaagggtctggaatggattggagtgatttggggctctgagactacttactaccaatcatccctcaagtcacgcgtcaccatctcaaaggacaactctaagaatcaggtgtcactgaaactgtcatctgtgaccgcagccgacaccgccgtgtactattgcgctaagcattactattatggcgggagctacgcaatggattactggggacagggtactctggtcaccgtgtccagccaccaccatcatcaccatcaccat

SEQ ID NO: 1071 - protein, 486 aa, Artificial Sequence
  source: /note="Description of Artificial Sequence: Synthetic polypeptide"
MALPVTALLLPLALLLHAARPEIVMTQSPATLSLSPGERATLSCRASQDISKYLNWYQQKPGQAPRLLIYHTSRLHSGIPARFSGSGSGTDYTLTISSLQPEDFAVYFCQQGNTLPYTFGQGTKLEIKGGGGSGGGGSGGGGSQVQLQESGPGLVKPSETLSLTCTVSGVSLPDYGVSWIRQPPGKGLEWIGVIWGSETTYYQSSLKSRVTISKDNSKNQVSLKLSSVTAADTAVYYCAKHYYYGGSYAMDYWGQGTLVTVSSTTTPAPRPPTPAPTIASQPLSLRPEACRPAAGGAVHTRGLDFACDIYIWAPLAGTCGVLLLSLVITLYCKRGRKKLLYIFKQPFMRPVQTTQEEDGCSCRFPEEEEGGCELRVKFSRSADAPAYKQGQNQLYNELNLGRREEYDVLDKRRGRDPEMGGKPRRKNPQEGLYNELQKDKMAEAYSEIGMKGERRRGKGHDGLYQGLSTATKDTYDALHMQALPPR

SEQ ID NO: 1072 - DNA, 1458 bp, Artificial Sequence
  source: /note="Description of Artificial Sequence: Synthetic polynucleotide"
atggccctccctgtcaccgccctgctgcttccgctggctcttctgctccacgccgctcggcccgaaattgtgatgacccagtcacccgccactcttagcctttcacccggtgagcgcgcaaccctgtcttgcagagcctcccaagacatctcaaaataccttaattggtatcaacagaagcccggacaggctcctcgccttctgatctaccacaccagccggctccattctggaatccctgccaggttcagcggtagcggatctgggaccgactacaccctcactatcagctcactgcagccagaggacttcgctgtctatttctgtcagcaagggaacaccctgccctacacctttggacagggcaccaagctcgagattaaaggtggaggtggcagcggaggaggtgggtccggcggtggaggaagccaggtccaactccaagaaagcggaccgggtcttgtgaagccatcagaaactctttcactgacttgtactgtgagcggagtgtctctccccgattacggggtgtcttggatcagacagccaccggggaagggtctggaatggattggagtgatttggggctctgagactacttactaccaatcatccctcaagtcacgcgtcaccatctcaaaggacaactctaagaatcaggtgtcactgaaactgtcatctgtgaccgcagccgacaccgccgtgtactattgcgctaagcattactattatggcgggagctacgcaatggattactggggacagggtactctggtcaccgtgtccagcaccactaccccagcaccgaggccacccaccccggctcctaccatcgcctcccagcctctgtccctgcgtccggaggcatgtagacccgcagctggtggggccgtgcatacccggggtcttgacttcgcctgcgatatctacatttgggcccctctggctggtacttgcggggtcctgctgctttcactcgtgatcactctttactgtaagcgcggtcggaagaagctgctgtacatctttaagcaacccttcatgaggcctgtgcagactactcaagaggaggacggctgttcatgccggttcccagaggaggaggaaggcggctgcgaactgcgcgtgaaattcagccgcagcgcagatgctccagcctacaagcaggggcagaaccagctctacaacgaactcaatcttggtcggagagaggagtacgacgtgctggacaagcggagaggacgggacccagaaatgggcgggaagccgcgcagaaagaatccccaagagggcctgtacaacgagctccaaaaggataagatggcagaagcctatagcgagattggtatgaaaggggaacgcagaagaggcaaaggccacgacggactgtaccagggactcagcaccgccaccaaggacacctatgacgctcttcacatgcaggccctgccgcctcgg

SEQ ID NO: 1073 - protein, 271 aa, Artificial Sequence
  source: /note="Description of Artificial Sequence: Synthetic polypeptide"
MALPVTALLLPLALLLHAARPEIVMTQSPATLSLSPGERATLSCRASQDISKYLNWYQQKPGQAPRLLIYHTSRLHSGIPARFSGSGSGTDYTLTISSLQPEDFAVYFCQQGNTLPYTFGQGTKLEIKGGGGSGGGGSGGGGSQVQLQESGPGLVKPSETLSLTCTVSGVSLPDYGVSWIRQPPGKGLEWIGVIWGSETTYYQSSLKSRVTISKDNSKNQVSLKLSSVTAADTAVYYCAKHYYYGGSYAMDYWGQGTLVTVSSHHHHHHHH

SEQ ID NO: 1074 - protein, 242 aa, Artificial Sequence
  source: /note="Description of Artificial Sequence: Synthetic polypeptide"
QVQLQESGPGLVKPSETLSLTCTVSGVSLPDYGVSWIRQPPGKGLEWIGVIWGSETTYYSSSLKSRVTISKDNSKNQVSLKLSSVTAADTAVYYCAKHYYYGGSYAMDYWGQGTLVTVSSGGGGSGGGGSGGGGSEIVMTQSPATLSLSPGERATLSCRASQDISKYLNWYQQKPGQAPRLLIYHTSRLHSGIPARFSGSGSGTDYTLTISSLQPEDFAVYFCQQGNTLPYTFGQGTKLEIK

SEQ ID NO: 1075 - protein, 486 aa, Artificial Sequence
  source: /note="Description of Artificial Sequence: Synthetic polypeptide"
MALPVTALLLPLALLLHAARPQVQLQESGPGLVKPSETLSLTCTVSGVSLPDYGVSWIRQPPGKGLEWIGVIWGSETTYYSSSLKSRVTISKDNSKNQVSLKLSSVTAADTAVYYCAKHYYYGGSYAMDYWGQGTLVTVSSGGGGSGGGGSGGGGSEIVMTQSPATLSLSPGERATLSCRASQDISKYLNWYQQKPGQAPRLLIYHTSRLHSGIPARFSGSGSGTDYTLTISSLQPEDFAVYFCQQGNTLPYTFGQGTKLEIKTTTPAPRPPTPAPTIASQPLSLRPEACRPAAGGAVHTRGLDFACDIYIWAPLAGTCGVLLLSLVITLYCKRGRKKLLYIFKQPFMRPVQTTQEEDGCSCRFPEEEEGGCELRVKFSRSADAPAYKQGQNQLYNELNLGRREEYDVLDKRRGRDPEMGGKPRRKNPQEGLYNELQKDKMAEAYSEIGMKGERRRGKGHDGLYQGLSTATKDTYDALHMQALPPR

SEQ ID NO: 1076 - protein, 242 aa, Artificial Sequence
  source: /note="Description of Artificial Sequence: Synthetic polypeptide"
QVQLQESGPGLVKPSETLSLTCTVSGVSLPDYGVSWIRQPPGKGLEWIGVIWGSETTYYQSSLKSRVTISKDNSKNQVSLKLSSVTAADTAVYYCAKHYYYGGSYAMDYWGQGTLVTVSSGGGGSGGGGSGGGGSEIVMTQSPATLSLSPGERATLSCRASQDISKYLNWYQQKPGQAPRLLIYHTSRLHSGIPARFSGSGSGTDYTLTISSLQPEDFAVYFCQQGNTLPYTFGQGTKLEIK

SEQ ID NO: 1077 - protein, 486 aa, Artificial Sequence
  source: /note="Description of Artificial Sequence: Synthetic polypeptide"
MALPVTALLLPLALLLHAARPQVQLQESGPGLVKPSETLSLTCTVSGVSLPDYGVSWIRQPPGKGLEWIGVIWGSETTYYQSSLKSRVTISKDNSKNQVSLKLSSVTAADTAVYYCAKHYYYGGSYAMDYWGQGTLVTVSSGGGGSGGGGSGGGGSEIVMTQSPATLSLSPGERATLSCRASQDISKYLNWYQQKPGQAPRLLIYHTSRLHSGIPARFSGSGSGTDYTLTISSLQPEDFAVYFCQQGNTLPYTFGQGTKLEIKTTTPAPRPPTPAPTIASQPLSLRPEACRPAAGGAVHTRGLDFACDIYIWAPLAGTCGVLLLSLVITLYCKRGRKKLLYIFKQPFMRPVQTTQEEDGCSCRFPEEEEGGCELRVKFSRSADAPAYKQGQNQLYNELNLGRREEYDVLDKRRGRDPEMGGKPRRKNPQEGLYNELQKDKMAEAYSEIGMKGERRRGKGHDGLYQGLSTATKDTYDALHMQALPPR

SEQ ID NO: 1078 - protein, 247 aa, Artificial Sequence
  source: /note="Description of Artificial Sequence: Synthetic polypeptide"
EIVMTQSPATLSLSPGERATLSCRASQDISKYLNWYQQKPGQAPRLLIYHTSRLHSGIPARFSGSGSGTDYTLTISSLQPEDFAVYFCQQGNTLPYTFGQGTKLEIKGGGGSGGGGSGGGGSGGGGSQVQLQESGPGLVKPSETLSLTCTVSGVSLPDYGVSWIRQPPGKGLEWIGVIWGSETTYYSSSLKSRVTISKDNSKNQVSLKLSSVTAADTAVYYCAKHYYYGGSYAMDYWGQGTLVTVSS

SEQ ID NO: 1079 - protein, 491 aa, Artificial Sequence
  source: /note="Description of Artificial Sequence: Synthetic polypeptide"
MALPVTALLLPLALLLHAARPEIVMTQSPATLSLSPGERATLSCRASQDISKYLNWYQQKPGQAPRLLIYHTSRLHSGIPARFSGSGSGTDYTLTISSLQPEDFAVYFCQQGNTLPYTFGQGTKLEIKGGGGSGGGGSGGGGSGGGGSQVQLQESGPGLVKPSETLSLTCTVSGVSLPDYGVSWIRQPPGKGLEWIGVIWGSETTYYSSSLKSRVTISKDNSKNQVSLKLSSVTAADTAVYYCAKHYYYGGSYAMDYWGQGTLVTVSSTTTPAPRPPTPAPTIASQPLSLRPEACRPAAGGAVHTRGLDFACDIYIWAPLAGTCGVLLLSLVITLYCKRGRKKLLYIFKQPFMRPVQTTQEEDGCSCRFPEEEEGGCELRVKFSRSADAPAYKQGQNQLYNELNLGRREEYDVLDKRRGRDPEMGGKPRRKNPQEGLYNELQKDKMAEAYSEIGMKGERRRGKGHDGLYQGLSTATKDTYDALHMQALPPR

SEQ ID NO: 1080 - protein, 247 aa, Artificial Sequence
  source: /note="Description of Artificial Sequence: Synthetic polypeptide"
EIVMTQSPATLSLSPGERATLSCRASQDISKYLNWYQQKPGQAPRLLIYHTSRLHSGIPARFSGSGSGTDYTLTISSLQPEDFAVYFCQQGNTLPYTFGQGTKLEIKGGGGSGGGGSGGGGSGGGGSQVQLQESGPGLVKPSETLSLTCTVSGVSLPDYGVSWIRQPPGKGLEWIGVIWGSETTYYQSSLKSRVTISKDNSKNQVSLKLSSVTAADTAVYYCAKHYYYGGSYAMDYWGQGTLVTVSS

SEQ ID NO: 1081 - protein, 491 aa, Artificial Sequence
  source: /note="Description of Artificial Sequence: Synthetic polypeptide"
MALPVTALLLPLALLLHAARPEIVMTQSPATLSLSPGERATLSCRASQDISKYLNWYQQKPGQAPRLLIYHTSRLHSGIPARFSGSGSGTDYTLTISSLQPEDFAVYFCQQGNTLPYTFGQGTKLEIKGGGGSGGGGSGGGGSGGGGSQVQLQESGPGLVKPSETLSLTCTVSGVSLPDYGVSWIRQPPGKGLEWIGVIWGSETTYYQSSLKSRVTISKDNSKNQVSLKLSSVTAADTAVYYCAKHYYYGGSYAMDYWGQGTLVTVSSTTTPAPRPPTPAPTIASQPLSLRPEACRPAAGGAVHTRGLDFACDIYIWAPLAGTCGVLLLSLVITLYCKRGRKKLLYIFKQPFMRPVQTTQEEDGCSCRFPEEEEGGCELRVKFSRSADAPAYKQGQNQLYNELNLGRREEYDVLDKRRGRDPEMGGKPRRKNPQEGLYNELQKDKMAEAYSEIGMKGERRRGKGHDGLYQGLSTATKDTYDALHMQALPPR

SEQ ID NO: 1082 - protein, 247 aa, Artificial Sequence
  source: /note="Description of Artificial Sequence: Synthetic polypeptide"
QVQLQESGPGLVKPSETLSLTCTVSGVSLPDYGVSWIRQPPGKGLEWIGVIWGSETTYYSSSLKSRVTISKDNSKNQVSLKLSSVTAADTAVYYCAKHYYYGGSYAMDYWGQGTLVTVSSGGGGSGGGGSGGGGSGGGGSEIVMTQSPATLSLSPGERATLSCRASQDISKYLNWYQQKPGQAPRLLIYHTSRLHSGIPARFSGSGSGTDYTLTISSLQPEDFAVYFCQQGNTLPYTFGQGTKLEIK

SEQ ID NO: 1083 - protein, 491 aa, Artificial Sequence
  source: /note="Description of Artificial Sequence: Synthetic polypeptide"
MALPVTALLLPLALLLHAARPQVQLQESGPGLVKPSETLSLTCTVSGVSLPDYGVSWIRQPPGKGLEWIGVIWGSETTYYSSSLKSRVTISKDNSKNQVSLKLSSVTAADTAVYYCAKHYYYGGSYAMDYWGQGTLVTVSSGGGGSGGGGSGGGGSGGGGSEIVMTQSPATLSLSPGERATLSCRASQDISKYLNWYQQKPGQAPRLLIYHTSRLHSGIPARFSGSGSGTDYTLTISSLQPEDFAVYFCQQGNTLPYTFGQGTKLEIKTTTPAPRPPTPAPTIASQPLSLRPEACRPAAGGAVHTRGLDFACDIYIWAPLAGTCGVLLLSLVITLYCKRGRKKLLYIFKQPFMRPVQTTQEEDGCSCRFPEEEEGGCELRVKFSRSADAPAYKQGQNQLYNELNLGRREEYDVLDKRRGRDPEMGGKPRRKNPQEGLYNELQKDKMAEAYSEIGMKGERRRGKGHDGLYQGLSTATKDTYDALHMQALPPR

SEQ ID NO: 1084 - protein, 247 aa, Artificial Sequence
  source: /note="Description of Artificial Sequence: Synthetic polypeptide"
QVQLQESGPGLVKPSETLSLTCTVSGVSLPDYGVSWIRQPPGKGLEWIGVIWGSETTYYQSSLKSRVTISKDNSKNQVSLKLSSVTAADTAVYYCAKHYYYGGSYAMDYWGQGTLVTVSSGGGGSGGGGSGGGGSGGGGSEIVMTQSPATLSLSPGERATLSCRASQDISKYLNWYQQKPGQAPRLLIYHTSRLHSGIPARFSGSGSGTDYTLTISSLQPEDFAVYFCQQGNTLPYTFGQGTKLEIK

SEQ ID NO: 1085 - protein, 491 aa, Artificial Sequence
  source: /note="Description of Artificial Sequence: Synthetic polypeptide"
MALPVTALLLPLALLLHAARPQVQLQESGPGLVKPSETLSLTCTVSGVSLPDYGVSWIRQPPGKGLEWIGVIWGSETTYYQSSLKSRVTISKDNSKNQVSLKLSSVTAADTAVYYCAKHYYYGGSYAMDYWGQGTLVTVSSGGGGSGGGGSGGGGSGGGGSEIVMTQSPATLSLSPGERATLSCRASQDISKYLNWYQQKPGQAPRLLIYHTSRLHSGIPARFSGSGSGTDYTLTISSLQPEDFAVYFCQQGNTLPYTFGQGTKLEIKTTTPAPRPPTPAPTIASQPLSLRPEACRPAAGGAVHTRGLDFACDIYIWAPLAGTCGVLLLSLVITLYCKRGRKKLLYIFKQPFMRPVQTTQEEDGCSCRFPEEEEGGCELRVKFSRSADAPAYKQGQNQLYNELNLGRREEYDVLDKRRGRDPEMGGKPRRKNPQEGLYNELQKDKMAEAYSEIGMKGERRRGKGHDGLYQGLSTATKDTYDALHMQALPPR

SEQ ID NO: 1086 - protein, 247 aa, Artificial Sequence
  source: /note="Description of Artificial Sequence: Synthetic polypeptide"
EIVMTQSPATLSLSPGERATLSCRASQDISKYLNWYQQKPGQAPRLLIYHTSRLHSGIPARFSGSGSGTDYTLTISSLQPEDFAVYFCQQGNTLPYTFGQGTKLEIKGGGGSGGGGSGGGGSGGGGSQVQLQESGPGLVKPSETLSLTCTVSGVSLPDYGVSWIRQPPGKGLEWIGVIWGSETTYYNSSLKSRVTISKDNSKNQVSLKLSSVTAADTAVYYCAKHYYYGGSYAMDYWGQGTLVTVSS

SEQ ID NO: 1087 - protein, 491 aa, Artificial Sequence
  source: /note="Description of Artificial Sequence: Synthetic polypeptide"
MALPVTALLLPLALLLHAARPEIVMTQSPATLSLSPGERATLSCRASQDISKYLNWYQQKPGQAPRLLIYHTSRLHSGIPARFSGSGSGTDYTLTISSLQPEDFAVYFCQQGNTLPYTFGQGTKLEIKGGGGSGGGGSGGGGSGGGGSQVQLQESGPGLVKPSETLSLTCTVSGVSLPDYGVSWIRQPPGKGLEWIGVIWGSETTYYNSSLKSRVTISKDNSKNQVSLKLSSVTAADTAVYYCAKHYYYGGSYAMDYWGQGTLVTVSSTTTPAPRPPTPAPTIASQPLSLRPEACRPAAGGAVHTRGLDFACDIYIWAPLAGTCGVLLLSLVITLYCKRGRKKLLYIFKQPFMRPVQTTQEEDGCSCRFPEEEEGGCELRVKFSRSADAPAYKQGQNQLYNELNLGRREEYDVLDKRRGRDPEMGGKPRRKNPQEGLYNELQKDKMAEAYSEIGMKGERRRGKGHDGLYQGLSTATKDTYDALHMQALPPR

SEQ ID NO: 1088 - protein, 247 aa, Artificial Sequence
  source: /note="Description of Artificial Sequence: Synthetic polypeptide"
QVQLQESGPGLVKPSETLSLTCTVSGVSLPDYGVSWIRQPPGKGLEWIGVIWGSETTYYNSSLKSRVTISKDNSKNQVSLKLSSVTAADTAVYYCAKHYYYGGSYAMDYWGQGTLVTVSSGGGGSGGGGSGGGGSGGGGSEIVMTQSPATLSLSPGERATLSCRASQDISKYLNWYQQKPGQAPRLLIYHTSRLHSGIPARFSGSGSGTDYTLTISSLQPEDFAVYFCQQGNTLPYTFGQGTKLEIK

SEQ ID NO: 1089 - protein, 491 aa, Artificial Sequence; identical to SEQ ID NO: 1087
  source: /note="Description of Artificial Sequence: Synthetic polypeptide"

SEQ ID NO: 1090 - protein, 242 aa, Artificial Sequence
  source: /note="Description of Artificial Sequence: Synthetic polypeptide"
EIVMTQSPATLSLSPGERATLSCRASQDISKYLNWYQQKPGQAPRLLIYHTSRLHSGIPARFSGSGSGTDYTLTISSLQPEDFAVYFCQQGNTLPYTFGQGTKLEIKGGGGSGGGGSGGGGSQVQLQESGPGLVKPSETLSLTCTVSGVSLPDYGVSWIRQPPGKGLEWIGVIWGSETTYYNSSLKSRVTISKDNSKNQVSLKLSSVTAADTAVYYCAKHYYYGGSYAMDYWGQGTLVTVSS

SEQ ID NO: 1091 - protein, 491 aa, Artificial Sequence
  source: /note="Description of Artificial Sequence: Synthetic polypeptide"
MALPVTALLLPLALLLHAARPQVQLQESGPGLVKPSETLSLTCTVSGVSLPDYGVSWIRQPPGKGLEWIGVIWGSETTYYNSSLKSRVTISKDNSKNQVSLKLSSVTAADTAVYYCAKHYYYGGSYAMDYWGQGTLVTVSSGGGGSGGGGSGGGGSGGGGSEIVMTQSPATLSLSPGERATLSCRASQDISKYLNWYQQKPGQAPRLLIYHTSRLHSGIPARFSGSGSGTDYTLTISSLQPEDFAVYFCQQGNTLPYTFGQGTKLEIKTTTPAPRPPTPAPTIASQPLSLRPEACRPAAGGAVHTRGLDFACDIYIWAPLAGTCGVLLLSLVITLYCKRGRKKLLYIFKQPFMRPVQTTQEEDGCSCRFPEEEEGGCELRVKFSRSADAPAYKQGQNQLYNELNLGRREEYDVLDKRRGRDPEMGGKPRRKNPQEGLYNELQKDKMAEAYSEIGMKGERRRGKGHDGLYQGLSTATKDTYDALHMQALPPR

SEQ ID NO: 1092 - protein, 242 aa, Artificial Sequence
  source: /note="Description of Artificial Sequence: Synthetic polypeptide"
QVQLQESGPGLVKPSETLSLTCTVSGVSLPDYGVSWIRQPPGKGLEWIGVIWGSETTYYNSSLKSRVTISKDNSKNQVSLKLSSVTAADTAVYYCAKHYYYGGSYAMDYWGQGTLVTVSSGGGGSGGGGSGGGGSEIVMTQSPATLSLSPGERATLSCRASQDISKYLNWYQQKPGQAPRLLIYHTSRLHSGIPARFSGSGSGTDYTLTISSLQPEDFAVYFCQQGNTLPYTFGQGTKLEIK

SEQ ID NO: 1093 - protein, 486 aa, Artificial Sequence
  source: /note="Description of Artificial Sequence: Synthetic polypeptide"
MALPVTALLLPLALLLHAARPEIVMTQSPATLSLSPGERATLSCRASQDISKYLNWYQQKPGQAPRLLIYHTSRLHSGIPARFSGSGSGTDYTLTISSLQPEDFAVYFCQQGNTLPYTFGQGTKLEIKGGGGSGGGGSGGGGSQVQLQESGPGLVKPSETLSLTCTVSGVSLPDYGVSWIRQPPGKGLEWIGVIWGSETTYYNSSLKSRVTISKDNSKNQVSLKLSSVTAADTAVYYCAKHYYYGGSYAMDYWGQGTLVTVSSTTTPAPRPPTPAPTIASQPLSLRPEACRPAAGGAVHTRGLDFACDIYIWAPLAGTCGVLLLSLVITLYCKRGRKKLLYIFKQPFMRPVQTTQEEDGCSCRFPEEEEGGCELRVKFSRSADAPAYKQGQNQLYNELNLGRREEYDVLDKRRGRDPEMGGKPRRKNPQEGLYNELQKDKMAEAYSEIGMKGERRRGKGHDGLYQGLSTATKDTYDALHMQALPPR

SEQ ID NO: 1094 - protein, 5 aa, Artificial Sequence
  source: /note="Description of Artificial Sequence: Synthetic peptide"
DYGVS

SEQ ID NO: 1095 - protein, 16 aa, Artificial Sequence
  source: /note="Description of Artificial Sequence: Synthetic peptide"
VIWGSETTYYNSALKS

SEQ ID NO: 1096 - protein, 12 aa, Artificial Sequence
  source: /note="Description of Artificial Sequence: Synthetic peptide"
HYYYGGSYAMDY

SEQ ID NO: 1097 - protein, 11 aa, Artificial Sequence
  source: /note="Description of Artificial Sequence: Synthetic peptide"
RASQDISKYLN

SEQ ID NO: 1098 - protein, 7 aa, Artificial Sequence
  source: /note="Description of Artificial Sequence: Synthetic peptide"
HTSRLHS

SEQ ID NO: 1099 - protein, 9 aa, Artificial Sequence
  source: /note="Description of Artificial Sequence: Synthetic peptide"
QQGNTLPYT

SEQ ID NO: 1100 - protein, 5 aa, Artificial Sequence
  source: /note="Description of Artificial Sequence: Synthetic peptide"
DYGVS

SEQ ID NO: 1101 - protein, 16 aa, Artificial Sequence
  source: /note="Description of Artificial Sequence: Synthetic peptide"
VIWGSETTYYSSSLKS

SEQ ID NO: 1102 - protein, 12 aa, Artificial Sequence
  source: /note="Description of Artificial Sequence: Synthetic peptide"
HYYYGGSYAMDY

SEQ ID NO: 1103 - protein, 11 aa, Artificial Sequence
  source: /note="Description of Artificial Sequence: Synthetic peptide"
RASQDISKYLN

SEQ ID NO: 1104 - protein, 7 aa, Artificial Sequence
  source: /note="Description of Artificial Sequence: Synthetic peptide"
HTSRLHS

SEQ ID NO: 1105 - protein, 9 aa, Artificial Sequence
  source: /note="Description of Artificial Sequence: Synthetic peptide"
QQGNTLPYT

SEQ ID NO: 1106 - protein, 5 aa, Artificial Sequence
  source: /note="Description of Artificial Sequence: Synthetic peptide"
DYGVS

SEQ ID NO: 1107 - protein, 16 aa, Artificial Sequence
  source: /note="Description of Artificial Sequence: Synthetic peptide"
VIWGSETTYYQSSLKS

SEQ ID NO: 1108 - protein, 12 aa, Artificial Sequence
  source: /note="Description of Artificial Sequence: Synthetic peptide"
HYYYGGSYAMDY

SEQ ID NO: 1109 - protein, 11 aa, Artificial Sequence
  source: /note="Description of Artificial Sequence: Synthetic peptide"
RASQDISKYLN

SEQ ID NO: 1110 - protein, 7 aa, Artificial Sequence
  source: /note="Description of Artificial Sequence: Synthetic peptide"
HTSRLHS

SEQ ID NO: 1111 - protein, 9 aa, Artificial Sequence
  source: /note="Description of Artificial Sequence: Synthetic peptide"
QQGNTLPYT

SEQ ID NO: 1112 - protein, 5 aa, Artificial Sequence
  source: /note="Description of Artificial Sequence: Synthetic peptide"
DYGVS

SEQ ID NO: 1113 - protein, 16 aa, Artificial Sequence
  source: /note="Description of Artificial Sequence: Synthetic peptide"
VIWGSETTYYNSSLKS

SEQ ID NO: 1114 - protein, 12 aa, Artificial Sequence
  source: /note="Description of Artificial Sequence: Synthetic peptide"
HYYYGGSYAMDY

SEQ ID NO: 1115 - protein, 11 aa, Artificial Sequence
  source: /note="Description of Artificial Sequence: Synthetic peptide"
RASQDISKYLN

SEQ ID NO: 1116 - protein, 7 aa, Artificial Sequence
  source: /note="Description of Artificial Sequence: Synthetic peptide"
HTSRLHS

SEQ ID NO: 1117 - protein, 9 aa, Artificial Sequence
  source: /note="Description of Artificial Sequence: Synthetic peptide"
QQGNTLPYT

SEQ ID NO: 1118 - protein, 5 aa, Artificial Sequence
  source: /note="Description of Artificial Sequence: Synthetic peptide"
NHGMS

SEQ ID NO: 1119 - protein, 5 aa, Artificial Sequence
  source: /note="Description of Artificial Sequence: Synthetic peptide"
NYAMS

SEQ ID NO: 1120 - protein, 5 aa, Artificial Sequence
  source: /note="Description of Artificial Sequence: Synthetic peptide"
DYAMH

SEQ ID NO: 1121 - protein, 5 aa, Artificial Sequence
  source: /note="Description of Artificial Sequence: Synthetic peptide"
NHGMS

SEQ ID NO: 1122 - protein, 5 aa, Artificial Sequence
  source: /note="Description of Artificial Sequence: Synthetic peptide"
NFGIN

SEQ ID NO: 1123 - protein, 5 aa, Artificial Sequence
  source: /note="Description of Artificial Sequence: Synthetic peptide"
SDAMT

SEQ ID NO: 1124 - protein, 5 aa, Artificial Sequence
  source: /note="Description of Artificial Sequence: Synthetic peptide"
NYGIT

SEQ ID NO: 1125 - protein, 5 aa, Artificial Sequence
  source: /note="Description of Artificial Sequence: Synthetic peptide"
NHGMS

SEQ ID NO: 1126 - protein, 5 aa, Artificial Sequence
  source: /note="Description of Artificial Sequence: Synthetic peptide"
NHGMS

SEQ ID NO: 1127 - protein, 5 aa, Artificial Sequence
  source: /note="Description of Artificial Sequence: Synthetic peptide"
NHGMS

SEQ ID NO: 1128 - protein, 5 aa, Artificial Sequence
  source: /note="Description of Artificial Sequence: Synthetic peptide"
DYYMS

SEQ ID NO: 1129 - protein, 5 aa, Artificial Sequence
  source: /note="Description of Artificial Sequence: Synthetic peptide"
DYYMS

SEQ ID NO: 1130 - protein, 5 aa, Artificial Sequence
  source: /note="Description of Artificial Sequence: Synthetic peptide"
NHGMS

SEQ ID NO: 1131 - protein, 5 aa, Artificial Sequence
  source: /note="Description of Artificial Sequence: Synthetic peptide"
NHGMS

SEQ ID NO: 1132 - protein, 5 aa, Artificial Sequence
  source: /note="Description of Artificial Sequence: Synthetic peptide"
NHGMS

SEQ ID NO: 1133 - protein, 7 aa, Artificial Sequence
  source: /note="Description of Artificial Sequence: Synthetic peptide"
SSYYYWG

SEQ ID NO: 1134 - protein, 7 aa, Artificial Sequence
  source: /note="Description of Artificial Sequence: Synthetic peptide"
TSGMCVS

SEQ ID NO: 1135 - protein, 5 aa, Artificial Sequence
  source: /note="Description of Artificial Sequence: Synthetic peptide"
SYSMN

SEQ ID NO: 1136 - protein, 5 aa, Artificial Sequence
  source: /note="Description of Artificial Sequence: Synthetic peptide"
DYYMS

SEQ ID NO: 1137 - protein, 5 aa, Artificial Sequence
  source: /note="Description of Artificial Sequence: Synthetic peptide"
SHYIH

SEQ ID NO: 1138 - protein, 7 aa, Artificial Sequence
  source: /note="Description of Artificial Sequence: Synthetic peptide"
SGGYYWS

SEQ ID NO: 1139 - protein, 5 aa, Artificial Sequence
  source: /note="Description of Artificial Sequence: Synthetic peptide"
SYAIS

SEQ ID NO: 1140 - protein, 7 aa, Artificial Sequence
  source: /note="Description of Artificial Sequence: Synthetic peptide"
SNSAAWN

SEQ ID NO: 1141 - protein, 5 aa, Artificial Sequence
  source: /note="Description of Artificial Sequence: Synthetic peptide"
SYAMS

SEQ ID NO: 1142 - protein, 5 aa, Artificial Sequence
  source: /note="Description of Artificial Sequence: Synthetic peptide"
RYPMS

SEQ ID NO: 1143 - protein, 5 aa, Artificial Sequence
  source: /note="Description of Artificial Sequence: Synthetic peptide"
SYAMS

SEQ ID NO: 1144 - protein, 5 aa, Artificial Sequence
  source: /note="Description of Artificial Sequence: Synthetic peptide"
SYAMS

SEQ ID NO: 1145 - protein, 5 aa, Artificial Sequence
  source: /note="Description of Artificial Sequence: Synthetic peptide"
DYAMH

SEQ ID NO: 1146 - protein, 5 aa, Artificial Sequence
  source: /note="Description of Artificial Sequence: Synthetic peptide"
DYAMH

SEQ ID NO: 1147 - protein, 5 aa, Artificial Sequence
  source: /note="Description of Artificial Sequence: Synthetic peptide"
SYAMS

SEQ ID NO: 1148 - protein, 5 aa, Artificial Sequence
  source: /note="Description of Artificial Sequence: Synthetic peptide"
SYAMS

SEQ ID NO: 1149 - protein, 5 aa, Artificial Sequence
  source: /note="Description of Artificial Sequence: Synthetic peptide"
SYAMS

SEQ ID NO: 1150 - protein, 5 aa, Artificial Sequence
  source: /note="Description of Artificial Sequence: Synthetic peptide"
SYAMS

SEQ ID NO: 1151 - protein, 5 aa, Artificial Sequence
  source: /note="Description of Artificial Sequence: Synthetic peptide"
SYAMS

SEQ ID NO: 1152 - protein, 5 aa, Artificial Sequence
  source: /note="Description of Artificial Sequence: Synthetic peptide"
SYAMS

SEQ ID NO: 1153 - protein, 5 aa, Artificial Sequence
  source: /note="Description of Artificial Sequence: Synthetic peptide"
SYAMS

SEQ ID NO: 1154 - protein, 5 aa, Artificial Sequence
  source: /note="Description of Artificial Sequence: Synthetic peptide"
NFGMN

SEQ ID NO: 1155 - protein, 5 aa, Artificial Sequence
  source: /note="Description of Artificial Sequence: Synthetic peptide"
DYSIN

SEQ ID NO: 1156 - protein, 5 aa, Artificial Sequence
  source: /note="Description of Artificial Sequence: Synthetic peptide"
HYSMN

SEQ ID NO: 1157 - protein, 5 aa, Artificial Sequence
  source: /note="Description of Artificial Sequence: Synthetic peptide"
HYSMN

SEQ ID NO: 1158 - protein, 16 aa, Artificial Sequence
  source: /note="Description of Artificial Sequence: Synthetic peptide"
GIVYSGSTYYAASVKG

SEQ ID NO: 1159 - protein, 17 aa, Artificial Sequence
  source: /note="Description of Artificial Sequence: Synthetic peptide"
GISRSGENTYYADSVKG

SEQ ID NO: 1160 - protein, 17 aa, Artificial Sequence
  source: /note="Description of Artificial Sequence: Synthetic peptide"
GISWNSGSIGYADSVKG

SEQ ID NO: 1161 - protein, 16 aa, Artificial Sequence
  source: /note="Description of Artificial Sequence: Synthetic peptide"
GIVYSGSTYYAASVKG

SEQ ID NO: 1162 - protein, 17 aa, Artificial Sequence
  source: /note="Description of Artificial Sequence: Synthetic peptide"
WINPKNNNTNYAQKFQG

SEQ ID NO: 1163 - protein, 17 aa, Artificial Sequence
  source: /note="Description of Artificial Sequence: Synthetic peptide"
VISGSGGTTYYADSVKG

SEQ ID NO: 1164 - protein, 17 aa, Artificial Sequence
  source: /note="Description of Artificial Sequence: Synthetic peptide"
WISAYNGNTNYAQKFQG

SEQ ID NO: 1165 - protein, 16 aa, Artificial Sequence
  source: /note="Description of Artificial Sequence: Synthetic peptide"
GIVYSGSTYYAASVKG

SEQ ID NO: 1166 - protein, 16 aa, Artificial Sequence
  source: /note="Description of Artificial Sequence: Synthetic peptide"
GIVYSGSTYYAASVKG

SEQ ID NO: 1167 - protein, 16 aa, Artificial Sequence
  source: /note="Description of Artificial Sequence: Synthetic peptide"
GIVYSGSTYYAASVKG

SEQ ID NO: 1168 - protein, 17 aa, Artificial Sequence
  source: /note="Description of Artificial Sequence: Synthetic peptide"
YISSSGSTIYYADSVKG

SEQ ID NO: 1169 - protein, 17 aa, Artificial Sequence
  source: /note="Description of Artificial Sequence: Synthetic peptide"
YISSSGNTIYYADSVKG

SEQ ID NO: 1170 - protein, 16 aa, Artificial Sequence
  source: /note="Description of Artificial Sequence: Synthetic peptide"
GIVYSGSTYYAASVKG

SEQ ID NO: 1171 - protein, 16 aa, Artificial Sequence
  source: /note="Description of Artificial Sequence: Synthetic peptide"
GIVYSGSTYYAASVKG

SEQ ID NO: 1172 - protein, 16 aa, Artificial Sequence
  source: /note="Description of Artificial Sequence: Synthetic peptide"
GIVYSGSTYYAASVKG

SEQ ID NO: 1173 - protein, 16 aa, Artificial Sequence
  source: /note="Description of Artificial Sequence: Synthetic peptide"
SIYYSGSAYYNPSLKS

SEQ ID NO: 1174 - protein, 16 aa, Artificial Sequence
  source: /note="Description of Artificial Sequence: Synthetic peptide"
RIDWDEDKFYSTSLKT

SEQ ID NO: 1175 - protein, 17 aa, Artificial Sequence
  source: /note="Description of Artificial Sequence: Synthetic peptide"
SISSSSSYIYYADSVKG

SEQ ID NO: 1176 - protein, 17 aa, Artificial Sequence
  source: /note="Description of Artificial Sequence: Synthetic peptide"
YISSSGSTIYYADSVKG

SEQ ID NO: 1177 - protein, 17 aa, Artificial Sequence
  source: /note="Description of Artificial Sequence: Synthetic peptide"
MINPSGGVTAYSQTLQG

SEQ ID NO: 1178 - protein, 16 aa, Artificial Sequence
  source: /note="Description of Artificial Sequence: Synthetic peptide"
YIYYSGSTYYNPSLKS

SEQ ID NO: 1179 - protein, 17 aa, Artificial Sequence
  source: /note="Description of Artificial Sequence: Synthetic peptide"
GIIPIFGTANYAQKFQG

SEQ ID NO: 1180 - protein, 18 aa, Artificial Sequence
  source: /note="Description of Artificial Sequence: Synthetic peptide"
RTYYRSKWYSFYAISLKS

SEQ ID NO: 1181 - protein, 17 aa, Artificial Sequence
  source: /note="Description of Artificial Sequence: Synthetic peptide"
AISGSGGSTYYADSVKG

SEQ ID NO: 1182 - protein, 17 aa, Artificial Sequence
  source: /note="Description of Artificial Sequence: Synthetic peptide"
GISDSGVSTYYADSAKG

SEQ ID NO: 1183 - protein, 17 aa, Artificial Sequence
  source: /note="Description of Artificial Sequence: Synthetic peptide"
AISGSGGSTYYADSVKG

SEQ ID NO: 1184 - protein, 17 aa, Artificial Sequence
  source: /note="Description of Artificial Sequence: Synthetic peptide"
AISGSGGSTYYADSVKG

SEQ ID NO: 1185 - protein, 17 aa, Artificial Sequence
  source: /note="Description of Artificial Sequence: Synthetic peptide"
GISWNSGSIGYADSVKG

SEQ ID NO: 1186 - protein, 17 aa, Artificial Sequence
  source: /note="Description of Artificial Sequence: Synthetic peptide"
SINWKGNSLAYGDSVKG

SEQ ID NO: 1187 - protein, 17 aa, Artificial Sequence
  source: /note="Description of Artificial Sequence: Synthetic peptide"
AISGSGGSTYYADSVKG

SEQ ID NO: 1188 - protein, 17 aa, Artificial Sequence
  source: /note="Description of Artificial Sequence: Synthetic peptide"
AISGSGGSTYYADSVKG

SEQ ID NO: 1189 - protein, 17 aa, Artificial Sequence
  source: /note="Description of Artificial Sequence: Synthetic peptide"
AISGSGGSTYYADSVKG

SEQ ID NO: 1190 - protein, 17 aa, Artificial Sequence
  source: /note="Description of Artificial Sequence: Synthetic peptide"
AISGSGGSTYYADSVKG

SEQ ID NO: 1191 - protein, 17 aa, Artificial Sequence
  source: /note="Description of Artificial Sequence: Synthetic peptide"
AISGSGGSTYYADSVKG

SEQ ID NO: 1192 - protein, 17 aa, Artificial Sequence
  source: /note="Description of Artificial Sequence: Synthetic peptide"
AISGSGGSTYYADSVKG

SEQ ID NO: 1193 - protein, 17 aa, Artificial Sequence
  source: /note="Description of Artificial Sequence: Synthetic peptide"
AISGSGGSTYYADSVKG

SEQ ID NO: 1194 - protein, 17 aa, Artificial Sequence
  source: /note="Description of Artificial Sequence: Synthetic peptide"
WINTYTGESYFADDFKG

SEQ ID NO: 1195 - protein, 17 aa, Artificial Sequence
  source: /note="Description of Artificial Sequence: Synthetic peptide"
WINTETREPAYAYDFRG

SEQ ID NO: 1196 - protein, 17 aa, Artificial Sequence
  source: /note="Description of Artificial Sequence: Synthetic peptide"
RINTESGVPIYADDFKG

SEQ ID NO: 1197 - protein, 17 aa, Artificial Sequence
  source: /note="Description of Artificial Sequence: Synthetic peptide"
RINTETGEPLYADDFKG

SEQ ID NO: 1198 - protein, 7 aa, Artificial Sequence
  source: /note="Description of Artificial Sequence: Synthetic peptide"
HGGESDV

SEQ ID NO: 1199 - protein, 11 aa, Artificial Sequence
  source: /note="Description of Artificial Sequence: Synthetic peptide"
SPAHYYGGMDV

SEQ ID NO: 1200 - protein, 6 aa, Artificial Sequence
  source: /note="Description of Artificial Sequence: Synthetic peptide"
HSFLAY

SEQ ID NO: 1201 - protein, 7 aa, Artificial Sequence
  source: /note="Description of Artificial Sequence: Synthetic peptide"
HGGESDV

SEQ ID NO: 1202 - protein, 11 aa, Artificial Sequence
  source: /note="Description of Artificial Sequence: Synthetic peptide"
GPYYYQSYMDV

SEQ ID NO: 1203 - protein, 14 aa, Artificial Sequence
  source: /note="Description of Artificial Sequence: Synthetic peptide"
LDSSGYYYARGPRY

SEQ ID NO: 1204 - protein, 9 aa, Artificial Sequence
  source: /note="Description of Artificial Sequence: Synthetic peptide"
GPYYYYMDV

SEQ ID NO: 1205 - protein, 7 aa, Artificial Sequence
  source: /note="Description of Artificial Sequence: Synthetic peptide"
HGGESDV

SEQ ID NO: 1206 - protein, 7 aa, Artificial Sequence
  source: /note="Description of Artificial Sequence: Synthetic peptide"
HGGESDV

SEQ ID NO: 1207 - protein, 7 aa, Artificial Sequence
  source: /note="Description of Artificial Sequence: Synthetic peptide"
HGGESDV

SEQ ID NO: 1208 - protein, 8 aa, Artificial Sequence
  source: /note="Description of Artificial Sequence: Synthetic peptide"
ESGDGMDV

SEQ ID NO: 1209 - protein, 8 aa, Artificial Sequence
  source: /note="Description of Artificial Sequence: Synthetic peptide"
STMVREDY

SEQ ID NO: 1210 - protein, 7 aa, Artificial Sequence
  source: /note="Description of Artificial Sequence: Synthetic peptide"
HGGESDV

SEQ ID NO: 1211 - protein, 7 aa, Artificial Sequence
  source: /note="Description of Artificial Sequence: Synthetic peptide"
HGGESDV

SEQ ID NO: 1212 - protein, 7 aa, Artificial Sequence
  source: /note="Description of Artificial Sequence: Synthetic peptide"
HGGESDV

SEQ ID NO: 1213 - protein, 11 aa, Artificial Sequence
  source: /note="Description of Artificial Sequence: Synthetic peptide"
HWQEWPDAFDI

SEQ ID NO: 1214 - protein, 13 aa, Artificial Sequence
  source: /note="Description of Artificial Sequence: Synthetic peptide"
SGAGGTSATAFDI

SEQ ID NO: 1215 - protein, 10 aa, Artificial Sequence
  source: /note="Description of Artificial Sequence: Synthetic peptide"
TIAAVYAFDI

SEQ ID NO: 1216 - protein, 8 aa, Artificial Sequence
  source: /note="Description of Artificial Sequence: Synthetic peptide"
DLRGAFDI

SEQ ID NO: 1217 - protein, 11 aa, Artificial Sequence
  source: /note="Description of Artificial Sequence: Synthetic peptide"
EGSGSGWYFDF

SEQ ID NO: 1218 - protein, 13 aa, Artificial Sequence
  source: /note="Description of Artificial Sequence: Synthetic peptide"
AGIAARLRGAFDI

SEQ ID NO: 1219 - protein, 20 aa, Artificial Sequence
  source: /note="Description of Artificial Sequence: Synthetic peptide"
RGGYQLLRWDVGLLRSAFDI

SEQ ID NO: 1220 - protein, 13 aa, Artificial Sequence
  source: /note="Description of Artificial Sequence: Synthetic peptide"
SSPEGLFLYWFDP

SEQ ID NO: 1221 - protein, 9 aa, Artificial Sequence
  source: /note="Description of Artificial Sequence: Synthetic peptide"
VEGSGSLDY

SEQ ID NO: 1222 - protein, 9 aa, Artificial Sequence
  source: /note="Description of Artificial Sequence: Synthetic peptide"
RAGSEASDI

SEQ ID NO: 1223 - protein, 15 aa, Artificial Sequence
  source: /note="Description of Artificial Sequence: Synthetic peptide"
ATYKRELRYYYGMDV

SEQ ID NO: 1224 - protein, 15 aa, Artificial Sequence
  source: /note="Description of Artificial Sequence: Synthetic peptide"
ATYKRELRYYYGMDV

SEQ ID NO: 1225 - protein, 8 aa, Artificial Sequence
  source: /note="Description of Artificial Sequence: Synthetic peptide"
VGKAVPDV

SEQ ID NO: 1226 - protein, 13 aa, Artificial Sequence
  source: /note="Description of Artificial Sequence: Synthetic peptide"
HQGVAYYNYAMDV

SEQ ID NO: 1227 - protein, 8 aa, Artificial Sequence
  source: /note="Description of Artificial Sequence: Synthetic peptide"
VVRDGMDV

SEQ ID NO: 1228 - protein, 9 aa, Artificial Sequence
  source: /note="Description of Artificial Sequence: Synthetic peptide"
IPQTGTFDY

SEQ ID NO: 1229 - protein, 15 aa, Artificial Sequence
  source: /note="Description of Artificial Sequence: Synthetic peptide"
ANYKRELRYYYGMDV

SEQ ID NO: 1230 - protein, 11 aa, Artificial Sequence
  source: /note="Description of Artificial Sequence: Synthetic peptide"
ALVGATGAFDI

SEQ ID NO: 1231 - protein, 8 aa, Artificial Sequence
  source: /note="Description of Artificial Sequence: Synthetic peptide"
WFGEGFDP

SEQ ID NO: 1232 - protein, 17 aa, Artificial Sequence
  source: /note="Description of Artificial Sequence: Synthetic peptide"
VGYDSSGYYRDYYGMDV

SEQ ID NO: 1233 - protein, 13 aa, Artificial Sequence
  source: /note="Description of Artificial Sequence: Synthetic peptide"
MGWSSGYLGAFDI

SEQ ID NO: 1234 - protein, 13 aa, Artificial Sequence
  source: /note="Description of Artificial Sequence: Synthetic peptide"
GEIYYGYDGGFAY

SEQ ID NO: 1235 - protein, 8 aa, Artificial Sequence
  source: /note="Description of Artificial Sequence: Synthetic peptide"
DYSYAMDY

SEQ ID NO: 1236 - protein, 8 aa, Artificial Sequence
  source: /note="Description of Artificial Sequence: Synthetic peptide"
DYLYSLDF

SEQ ID NO: 1237 - protein, 8 aa, Artificial Sequence
  source: /note="Description of Artificial Sequence: Synthetic peptide"
DYLYSCDY

SEQ ID NO: 1238 - protein, 11 aa, Artificial Sequence
  source: /note="Description of Artificial Sequence: Synthetic peptide"
RASQSISSYLN

SEQ ID NO: 1239 - protein, 12 aa, Artificial Sequence
  source: /note="Description of Artificial Sequence: Synthetic peptide"
RASQSISSSFLA

SEQ ID NO: 1240 - protein, 16 aa, Artificial Sequence
  source: /note="Description of Artificial Sequence: Synthetic peptide"
RSSQSLLHSNGYNYLD

SEQ ID NO: 1241 - protein, 16 aa, Artificial Sequence
  source: /note="Description of Artificial Sequence: Synthetic peptide"
KSSQSLLRNDGKTPLY

SEQ ID NO: 1242 - protein, 16 aa, Artificial Sequence
  source: /note="Description of Artificial Sequence: Synthetic peptide"
RSSQSLLHSNGYNYLN

SEQ ID NO: 1243 - protein, 11 aa, Artificial Sequence
  source: /note="Description of Artificial Sequence: Synthetic peptide"
RASQSISSYLN

SEQ ID NO: 1244 - protein, 16 aa, Artificial Sequence
  source: /note="Description of Artificial Sequence: Synthetic peptide"
RSSQSLLYSNGYNYVD

SEQ ID NO: 1245 - protein, 11 aa, Artificial Sequence
  source: /note="Description of Artificial Sequence: Synthetic peptide"
RASQSVSSNLA

SEQ ID NO: 1246 - protein, 11 aa, Artificial Sequence
  source: /note="Description of Artificial Sequence: Synthetic peptide"
RASQSVSSKLA

SEQ ID NO: 1247 - protein, 12 aa, Artificial Sequence
  source: /note="Description of Artificial Sequence: Synthetic peptide"
RASQSVGSTNLA

SEQ ID NO: 1248 - protein, 11 aa, Artificial Sequence
  source: /note="Description of Artificial Sequence: Synthetic peptide"
RASQSISSYLN

SEQ ID NO: 1249 - protein, 16 aa, Artificial Sequence
  source: /note="Description of Artificial Sequence: Synthetic peptide"
KSSESLVHNSGKTYLN

SEQ ID NO: 1250 - protein, 11 aa, Artificial Sequence
  source: /note="Description of Artificial Sequence: Synthetic peptide"
QASEDINKFLN

SEQ ID NO: 1251 - protein, 11 aa, Artificial Sequence
  source: /note="Description of Artificial Sequence: Synthetic peptide"
RASQSVGSNLA

SEQ ID NO: 1252 - protein, 12 aa, Artificial Sequence
  source: /note="Description of Artificial Sequence: Synthetic peptide"
RASQSIGSSSLA

SEQ ID NO: 1253 - protein, 11 aa, Artificial Sequence
  source: /note="Description of Artificial Sequence: Synthetic peptide"
KASQDIDDAMN

SEQ ID NO: 1254 - protein, 11 aa, Artificial Sequence
  source: /note="Description of Artificial Sequence: Synthetic peptide"
RASQDIYNNLA

SEQ ID NO: 1255 - protein, 16 aa, Artificial Sequence
  source: /note="Description of Artificial Sequence: Synthetic peptide"
RSSQSLLHSNGYNYLD

SEQ ID NO: 1256 - protein, 11 aa, Artificial Sequence
  source: /note="Description of Artificial Sequence: Synthetic peptide"
GGNNIGTKSVH

SEQ ID NO: 1257 - protein, 11 aa, Artificial Sequence
  source: /note="Description of Artificial Sequence: Synthetic peptide"
SGDGLSKKYVS

SEQ ID NO: 1258 - protein, 11 aa, Artificial Sequence
  source: /note="Description of Artificial Sequence: Synthetic peptide"
RASQGIRNWLA

SEQ ID NO: 1259 - protein, 11 aa, Artificial Sequence
  source: /note="Description of Artificial Sequence: Synthetic peptide"
GGNNIGSKSVH

SEQ ID NO: 1260 - protein, 11 aa, Artificial Sequence
  source: /note="Description of Artificial Sequence: Synthetic peptide"
QGDSLGNYYAT

SEQ ID NO: 1261 - protein, 12 aa, Artificial Sequence
  source: /note="Description of Artificial Sequence: Synthetic peptide"
RASQSVSSAYLA

SEQ ID NO: 1262 - protein, 11 aa, Artificial Sequence
  source: /note="Description of Artificial Sequence: Synthetic peptide"
RASQSVSNSLA

SEQ ID NO: 1263 - protein, 12 aa, Artificial Sequence
  source: /note="Description of Artificial Sequence: Synthetic peptide"
RASQSVSSSFLA

SEQ ID NO: 1264 - protein, 12 aa, Artificial Sequence
  source: /note="Description of Artificial Sequence: Synthetic peptide"
RASQSVSTTFLA

SEQ ID NO: 1265 - protein, 11 aa, Artificial Sequence
  source: /note="Description of Artificial Sequence: Synthetic peptide"
RASQSISSYLN

SEQ ID NO: 1266 - protein, 12 aa, Artificial Sequence
  source: /note="Description of Artificial Sequence: Synthetic peptide"
RATQSIGSSFLA

SEQ ID NO: 1267 - protein, 12 aa, Artificial Sequence
  source: /note="Description of Artificial Sequence: Synthetic peptide"
RASQSVSSSYLA

SEQ ID NO: 1268 - protein, 12 aa, Artificial Sequence
  source: /note="Description of Artificial Sequence: Synthetic peptide"
RASQSVSSSYLA

SEQ ID NO: 1269 - protein, 12 aa, Artificial Sequence
  source: /note="Description of Artificial Sequence: Synthetic peptide"
RASQRVASNYLA

SEQ ID NO: 1270 - protein, 12 aa, Artificial Sequence
  source: /note="Description of Artificial Sequence: Synthetic peptide"
RASQSLSSNFLA

SEQ ID NO: 1271 - protein, 16 aa, Artificial Sequence
  source: /note="Description of Artificial Sequence: Synthetic peptide"
RSSQSLLHSNGYNYLD

SEQ ID NO: 1272 - protein, 12 aa, Artificial Sequence
  source: /note="Description of Artificial Sequence: Synthetic peptide"
RASQSVSSSYLA

SEQ ID NO: 1273 - protein, 12 aa, Artificial Sequence
  source: /note="Description of Artificial Sequence: Synthetic peptide"
RASQSVASSFLA

SEQ ID NO: 1274 - protein, 11 aa, Artificial Sequence
  source: /note="Description of Artificial Sequence: Synthetic peptide"
RASQDVNTAVS

SEQ ID NO: 1275 - protein, 15 aa, Artificial Sequence
  source: /note="Description of Artificial Sequence: Synthetic peptide"
RASESVSVIGAHLIH

SEQ ID NO: 1276 - protein, 15 aa, Artificial Sequence
  source: /note="Description of Artificial Sequence: Synthetic peptide"
RASESVTILGSHLIY

SEQ ID NO: 1277 - protein, 15 aa, Artificial Sequence
  source: /note="Description of Artificial Sequence: Synthetic peptide"
RASESVTILGSHLIY

SEQ ID NO: 1278 - protein, 7 aa, Artificial Sequence
  source: /note="Description of Artificial Sequence: Synthetic peptide"
AASSLQS

SEQ ID NO: 1279 - protein, 7 aa, Artificial Sequence
  source: /note="Description of Artificial Sequence: Synthetic peptide"
GASRRAT

SEQ ID NO: 1280 - protein, 7 aa, Artificial Sequence
  source: /note="Description of Artificial Sequence: Synthetic peptide"
LGSNRAS

SEQ ID NO: 1281 - protein, 7 aa, Artificial Sequence
  source: /note="Description of Artificial Sequence: Synthetic peptide"
EVSNRFS

SEQ ID NO: 1282 - protein, 7 aa, Artificial Sequence
  source: /note="Description of Artificial Sequence: Synthetic peptide"
LGSKRAS

SEQ ID NO: 1283 - protein, 7 aa, Artificial Sequence
  source: /note="Description of Artificial Sequence: Synthetic peptide"
GASTLAS

SEQ ID NO: 1284 - protein, 7 aa, Artificial Sequence
  source: /note="Description of Artificial Sequence: Synthetic peptide"
LGSNRAS

SEQ ID NO: 1285 - protein, 7 aa, Artificial Sequence
  source: /note="Description of Artificial Sequence: Synthetic peptide"
GASTRAS

SEQ ID NO: 1286 - protein, 7 aa, Artificial Sequence
  source: /note="Description of Artificial Sequence: Synthetic peptide"
GASIRAT

SEQ ID NO: 1287 - protein, 7 aa, Artificial Sequence
  source: /note="Description of Artificial Sequence: Synthetic peptide"
DASNRAT

SEQ ID NO: 1288 - protein, 7 aa, Artificial Sequence
  source: /note="Description of Artificial Sequence: Synthetic peptide"
AASSLQS

SEQ ID NO: 1289 - protein, 7 aa, Artificial Sequence
  source: /note="Description of Artificial Sequence: Synthetic peptide"
EVSNRDS

SEQ ID NO: 1290 - protein, 7 aa, Artificial Sequence
  source: /note="Description of Artificial Sequence: Synthetic peptide"
DASTLQT

SEQ ID NO: 1291 - protein, 7 aa, Artificial Sequence
  source: /note="Description of Artificial Sequence: Synthetic peptide"
GASTRAT

SEQ ID NO: 1292 - protein, 7 aa, Artificial Sequence
  source: /note="Description of Artificial Sequence: Synthetic peptide"
GASSRAS

SEQ ID NO: 1293 - protein, 7 aa, Artificial Sequence
  source: /note="Description of Artificial Sequence: Synthetic peptide"
SATSPVP

SEQ ID NO: 1294 - protein, 7 aa, Artificial Sequence
  source: /note="Description of Artificial Sequence: Synthetic peptide"
AANKSQS

SEQ ID NO: 1295 - protein, 7 aa, Artificial Sequence
  source: /note="Description of Artificial Sequence: Synthetic peptide"
LGSNRAS

SEQ ID NO: 1296 - protein, 7 aa, Artificial Sequence
  source: /note="Description of Artificial Sequence: Synthetic peptide"
DDSVRPS

SEQ ID NO: 1297 - protein, 7 aa, Artificial Sequence
  source: /note="Description of Artificial Sequence: Synthetic peptide"
RDKERPS

SEQ ID NO: 1298 - protein, 7 aa, Artificial Sequence
  source: /note="Description of Artificial Sequence: Synthetic peptide"
AASNLQS

SEQ ID NO: 1299 - protein, 7 aa, Artificial Sequence
  source: /note="Description of Artificial Sequence: Synthetic peptide"
GKNNRPS

SEQ ID NO: 1300 - protein, 7 aa, Artificial Sequence
  source: /note="Description of Artificial Sequence: Synthetic peptide"
GTNNRPS

SEQ ID NO: 1301 - protein, 7 aa, Artificial Sequence
  source: /note="Description of Artificial Sequence: Synthetic peptide"
GASTRAT

SEQ ID NO: 1302 - protein, 7 aa, Artificial Sequence
  source: /note="Description of Artificial Sequence: Synthetic peptide"
DASSRAT

SEQ ID NO: 1303 - protein, 7 aa, Artificial Sequence
  source: /note="Description of Artificial Sequence: Synthetic peptide"
GASSRAT

SEQ ID NO: 1304 - protein, 7 aa, Artificial Sequence
  source: /note="Description of Artificial Sequence: Synthetic peptide"
GSSNRAT

SEQ ID NO: 1305 - protein, 7 aa, Artificial Sequence
  source: /note="Description of Artificial Sequence: Synthetic peptide"
AASSLQS

SEQ ID NO: 1306 - protein, 7 aa, Artificial Sequence
  source: /note="Description of Artificial Sequence: Synthetic peptide"
GASQRAT

SEQ ID NO: 1307 - protein, 7 aa, Artificial Sequence
  source: /note="Description of Artificial Sequence: Synthetic peptide"
GASSRAT

SEQ ID NO: 1308 - protein, 7 aa, Artificial Sequence
  source: /note="Description of Artificial Sequence: Synthetic peptide"
GASSRAT

SEQ ID NO: 1309 - protein, 7 aa, Artificial Sequence
  source: /note="Description of Artificial Sequence: Synthetic peptide"
GASSRAT

SEQ ID NO: 1310 - protein, 7 aa, Artificial Sequence
  source: /note="Description of Artificial Sequence: Synthetic peptide"
GASNWAT

SEQ ID NO: 1311 - protein, 7 aa, Artificial Sequence
  source: /note="Description of Artificial Sequence: Synthetic peptide"
LGSNRAS

SEQ ID NO: 1312 - protein, 7 aa, Artificial Sequence
  source: /note="Description of Artificial Sequence: Synthetic peptide"
GTSSRAT

SEQ ID NO: 1313 - protein, 7 aa, Artificial Sequence
  source: /note="Description of Artificial Sequence: Synthetic peptide"
GASGRAT

SEQ ID NO: 1314 - protein, 7 aa, Artificial Sequence
  source: /note="Description of Artificial Sequence: Synthetic peptide"
SASYRYT

SEQ ID NO: 1315 - protein, 7 aa, Artificial Sequence
  source: /note="Description of Artificial Sequence: Synthetic peptide"
LASNLET

SEQ ID NO: 1316 - protein, 7 aa, Artificial Sequence
  source: /note="Description of Artificial Sequence: Synthetic peptide"
LASNVQT

SEQ ID NO: 1317 - protein, 7 aa, Artificial Sequence
  source: /note="Description of Artificial Sequence: Synthetic peptide"
LASNVQT

SEQ ID NO: 1318 - protein, 9 aa, Artificial Sequence
  source: /note="Description of Artificial Sequence: Synthetic peptide"
QQSYSTPYT

SEQ ID NO: 1319 - protein, 10 aa, Artificial Sequence
  source: /note="Description of Artificial Sequence: Synthetic peptide"
QQYHSSPSWT

SEQ ID NO: 1320 - protein, 9 aa, Artificial Sequence
  source: /note="Description of Artificial Sequence: Synthetic peptide"
MQALQTPYT

SEQ ID NO: 1321 - protein, 8 aa, Artificial Sequence
  source: /note="Description of Artificial Sequence: Synthetic peptide"
MQNIQFPS

SEQ ID NO: 1322 - protein, 9 aa, Artificial Sequence
  source: /note="Description of Artificial Sequence: Synthetic peptide"
MQALQTPYT

SEQ ID NO: 1323 - protein, 8 aa, Artificial Sequence
  source: /note="Description of Artificial Sequence: Synthetic peptide"
QQSYKRAS

SEQ ID NO: 1324 - protein, 9 aa, Artificial Sequence
  source: /note="Description of Artificial Sequence: Synthetic peptide"
MQGRQFPYS

SEQ ID NO: 1325 - protein, 8 aa, Artificial Sequence
  source: /note="Description of Artificial Sequence: Synthetic peptide"
QQYGSSLT

SEQ ID NO: 1326 - protein, 9 aa, Artificial Sequence
  source: /note="Description of Artificial Sequence: Synthetic peptide"
QQYGSSSWT

SEQ ID NO: 1327 - protein, 10 aa, Artificial Sequence
  source: /note="Description of Artificial Sequence: Synthetic peptide"
QQYGSSPPWT

SEQ ID NO: 1328 - protein, 7 aa, Artificial Sequence
  source: /note="Description of Artificial Sequence: Synthetic peptide"
QQSYTLA

SEQ ID NO: 1329 - protein, 9 aa, Artificial Sequence
  source: /note="Description of Artificial Sequence: Synthetic peptide"
MQGTHWPGT

SEQ ID NO: 1330 - protein, 9 aa, Artificial Sequence
  source: /note="Description of Artificial Sequence: Synthetic peptide"
QQYESLPLT

SEQ ID NO: 1331 - protein, 10 aa, Artificial Sequence
  source: /note="Description of Artificial Sequence: Synthetic peptide"
QQYNDWLPVT

SEQ ID NO: 1332 - protein, 10 aa, Artificial Sequence
  source: /note="Description of Artificial Sequence: Synthetic peptide"
QQYAGSPPFT

SEQ ID NO: 1333 - protein, 9 aa, Artificial Sequence
  source: /note="Description of Artificial Sequence: Synthetic peptide"
LQHDNFPLT

SEQ ID NO: 1334 - protein, 9 aa, Artificial Sequence
  source: /note="Description of Artificial Sequence: Synthetic peptide"
QHYYRFPYS

SEQ ID NO: 1335 - protein, 9 aa, Artificial Sequence
  source: /note="Description of Artificial Sequence: Synthetic peptide"
MQALQTPYT

SEQ ID NO: 1336 - protein, 11 aa, Artificial Sequence
  source: /note="Description of Artificial Sequence: Synthetic peptide"
QVWDSDSEHVV

SEQ ID NO: 1337 - protein, 9 aa, Artificial Sequence
  source: /note="Description of Artificial Sequence: Synthetic peptide"
QAWDDTTVV

SEQ ID NO: 1338 - protein, 9 aa, Artificial Sequence
  source: /note="Description of Artificial Sequence: Synthetic peptide"
QKYNSAPFT

SEQ ID NO: 1339 - protein, 12 aa, Artificial Sequence
  source: /note="Description of Artificial Sequence: Synthetic peptide"
SSRDSSGDHLRV

SEQ ID NO: 1340 - protein, 11 aa, Artificial Sequence
  source: /note="Description of Artificial Sequence: Synthetic peptide"
NSRDSSGHHLL

SEQ ID NO: 1341 - protein, 14 aa, Artificial Sequence
  source: /note="Description of Artificial Sequence: Synthetic peptide"
QHYGSSFNGSSLFT

SEQ ID NO: 1342 - protein, 10 aa, Artificial Sequence
  source: /note="Description of Artificial Sequence: Synthetic peptide"
QQFGTSSGLT

SEQ ID NO: 1343 - protein, 10 aa, Artificial Sequence
  source: /note="Description of Artificial Sequence: Synthetic peptide"
QQYHSSPSWT

SEQ ID NO: 1344 - protein, 10 aa, Artificial Sequence
  source: /note="Description of Artificial Sequence: Synthetic peptide"
QQYHSSPSWT

SEQ ID NO: 1345 - protein, 9 aa, Artificial Sequence
  source: /note="Description of Artificial Sequence: Synthetic peptide"
QQSYSTPYS

SEQ ID NO: 1346 - protein, 10 aa, Artificial Sequence
  source: /note="Description of Artificial Sequence: Synthetic peptide"
QHYESSPSWT

SEQ ID NO: 1347 - protein, 10 aa, Artificial Sequence
  source: /note="Description of Artificial Sequence: Synthetic peptide"
QQYGSPPRFT

SEQ ID NO: 1348 - protein, 10 aa, Artificial Sequence
  source: /note="Description of Artificial Sequence: Synthetic peptide"
QHYGSSPSWT

SEQ ID NO: 1349 - protein, 10 aa, Artificial Sequence
  source: /note="Description of Artificial Sequence: Synthetic peptide"
QHYDSSPSWT

SEQ ID NO: 1350 - protein, 10 aa, Artificial Sequence
  source: /note="Description of Artificial Sequence: Synthetic peptide"
QYYGTSPMYT

SEQ ID NO: 1351 - protein, 9 aa, Artificial Sequence
  source: /note="Description of Artificial Sequence: Synthetic peptide"
MQALQTPLT

SEQ ID NO: 1352 - protein, 11 aa, Artificial Sequence
  source: /note="Description of Artificial Sequence: Synthetic peptide"
QHYGNSPPKFT

SEQ ID NO: 1353 - protein, 10 aa, Artificial Sequence
  source: /note="Description of Artificial Sequence: Synthetic peptide"
QHYGGSPRLT

SEQ ID NO: 1354 - protein, 9 aa, Artificial Sequence
  source: /note="Description of Artificial Sequence: Synthetic peptide"
QQHYSTPWT

SEQ ID NO: 1355 - protein, 9 aa, Artificial Sequence
  source: /note="Description of Artificial Sequence: Synthetic peptide"
LQSRIFPRT

SEQ ID NO: 1356 - protein, 9 aa, Artificial Sequence
  source: /note="Description of Artificial Sequence: Synthetic peptide"
LQSRTIPRT

SEQ ID NO: 1357 - protein, 9 aa, Artificial Sequence
  source: /note="Description of Artificial Sequence: Synthetic peptide"
LQSRTIPRT

SEQ ID NO: 1358 - protein, 246 aa, Artificial Sequence
  source: /note="Description of Artificial Sequence: Synthetic polypeptide"
EIQLVQSGAEVKKPGATVKISCKGSGFNIEDYYIHWVQQAPGKGLEWMGRIDPENDETKYGPIFQGRVTITADTSTNTVYMELSSLRSEDTAVYYCAFRGGVYWGQGTTVTVSSGGGGSGGGGSGGGGSGGGGSDVVMTQSPDSLAVSLGERATINCKSSQSLLDSDGKTYLNWLQQKPGQPPKRLISLVSKLDSGVPDRFSGSGSGTDFTLTISSLQAEDVAVYYCWQGTHFPGTFGGGTKVEIK

SEQ ID NO: 1359 - DNA, 738 bp, Artificial Sequence
  source: /note="Description of Artificial Sequence: Synthetic polynucleotide"
gaaatccagctggtccaatcgggagctgaggtcaagaagccgggagccaccgtcaagatctcatgcaaggggtcgggattcaacatcgaggactactacattcactgggtgcagcaagctccgggaaaaggcctggaatggatgggcagaatcgacccagaaaacgacgaaactaagtacggaccgattttccaaggaagagtgactatcaccgccgatacttcaaccaataccgtctacatggaactgagctcgctccggtccgaagatactgcagtgtattactgtgcctttcgcggaggggtgtactggggccaaggaactactgtcactgtctcgtcaggaggcggagggtcgggaggaggcgggagcggaggcggtggctcgggtggcggaggaagcgacgtggtgatgacccagtccccggactccctcgccgtgagcctcggagagagggcgactatcaattgcaagtcgtcccagtcacttctggattccgatggtaaaacgtacctcaactggctgcagcaaaagccagggcagccacccaaacggttgatctcccttgtgtccaaactggatagcggagtgcctgaccgcttctcgggttccggtagcgggaccgacttcaccctgacgatcagctcactgcaggcggaggacgtggcagtgtactactgctggcagggaacccacttccctggcacctttggaggtggcaccaaggtggagatcaag

SEQ ID NO: 1360 - DNA, 831 bp, Artificial Sequence
  source: /note="Description of Artificial Sequence: Synthetic polynucleotide"
atggccctccctgtcaccgccctgctgcttccgctggctcttctgctccacgccgctcggcccgaaatccagctggtccaatcgggagctgaggtcaagaagccgggagccaccgtcaagatctcatgcaaggggtcgggattcaacatcgaggactactacattcactgggtgcagcaagctccgggaaaaggcctggaatggatgggcagaatcgacccagaaaacgacgaaactaagtacggaccgattttccaaggaagagtgactatcaccgccgatacttcaaccaataccgtctacatggaactgagctcgctccggtccgaagatactgcagtgtattactgtgcctttcgcggaggggtgtactggggccaaggaactactgtcactgtctcgtcaggaggcggagggtcgggaggaggcgggagcggaggcggtggctcgggtggcggaggaagcgacgtggtgatgacccagtccccggactccctcgccgtgagcctcggagagagggcgactatcaattgcaagtcgtcccagtcacttctggattccgatggtaaaacgtacctcaactggctgcagcaaaagccagggcagccacccaaacggttgatctcccttgtgtccaaactggatagcggagtgcctgaccgcttctcgggttccggtagcgggaccgacttcaccctgacgatcagctcactgcaggcggaggacgtggcagtgtactactgctggcagggaacccacttccctggcacctttggaggtggcaccaaggtggagatcaagggatcgcaccaccatcaccatcatcatcac

SEQ ID NO: 1361 - protein, 277 aa, Artificial Sequence
  source: /note="Description of Artificial Sequence: Synthetic polypeptide"
MALPVTALLLPLALLLHAARPEIQLVQSGAEVKKPGATVKISCKGSGFNIEDYYIHWVQQAPGKGLEWMGRIDPENDETKYGPIFQGRVTITADTSTNTVYMELSSLRSEDTAVYYCAFRGGVYWGQGTTVTVSSGGGGSGGGGSGGGGSGGGGSDVVMTQSPDSLAVSLGERATINCKSSQSLLDSDGKTYLNWLQQKPGQPPKRLISLVSKLDSGVPDRFSGSGSGTDFTLTISSLQAEDVAVYYCWQGTHFPGTFGGGTKVEIKGSHHHHHHHH

SEQ ID NO: 1362 - DNA, 1470 bp, Artificial Sequence
  source: /note="Description of Artificial Sequence: Synthetic polynucleotide"
atggccctccctgtcaccgccctgctgcttccgctggctcttctgctccacgccgctcggcccgagatccagctggtgcagtcgggagctgaagtcaaaaagcctggcgcaaccgtcaagatctcgtgcaaaggatcagggttcaacatcgaggactactacatccattgggtgcaacaggcacccggaaaaggcctggagtggatggggaggattgacccagaaaatgacgaaaccaagtacggaccgatcttccaaggacgggtgaccatcacggctgacacttccactaacaccgtctacatggaactctcgagccttcgctcggaagataccgcggtgtactactgcgcctttagaggtggagtctactggggacaagggactaccgtcaccgtgtcgtcaggtggcggaggatcaggcggaggcggctccggtggaggaggaagcggaggaggtggctccgacgtggtgatgacgcagtcaccggactccttggcggtgagcctgggtgaacgcgccactatcaactgcaagagctcccagagcttgctggactccgatggaaagacttatctcaattggctgcaacagaagcctggccagccgccaaagagactcatctcactggtgagcaagctggatagcggagtgccagatcggttttcgggatcgggctcaggcaccgacttcaccctgactatttcctccctccaagccgaggatgtggccgtctactactgttggcaggggactcacttcccggggaccttcggtggaggcactaaggtggagatcaaaaccactaccccagcaccgaggccacccaccccggctcctaccatcgcctcccagcctctgtccctgcgtccggaggcatgtagacccgcagctggtggggccgtgcatacccggggtcttgacttcgcctgcgatatctacatttgggcccctctggctggtacttgcggggtcctgctgctttcactcgtgatcactctttactgtaagcgcggtcggaagaagctgctgtacatctttaagcaacccttcatgaggcctgtgcagactactcaagaggaggacggctgttcatgccggttcccagaggaggaggaaggcggctgcgaactgcgcgtgaaattcagccgcagcgcagatgctccagcctacaagcaggggcagaaccagctctacaacgaactcaatcttggtcggagagaggagtacgacgtgctggacaagcggagaggacgggacccagaaatgggcgggaagccgcgcagaaagaatccccaagagggcctgtacaacgagctccaaaaggataagatggcagaagcctatagcgagattggtatgaaaggggaacgcagaagaggcaaaggccacgacggactgtaccagggactcagcaccgccaccaaggacacctatgacgctcttcacatgcaggccctgccgcctcgg

SEQ ID NO: 1363 - protein, 490 aa, Artificial Sequence
  source: /note="Description of Artificial Sequence: Synthetic polypeptide"
MALPVTALLLPLALLLHAARPEIQLVQSGAEVKKPGATVKISCKGSGFNIEDYYIHWVQQAPGKGLEWMGRIDPENDETKYGPIFQGRVTITADTSTNTVYMELSSLRSEDTAVYYCAFRGGVYWGQGTTVTVSSGGGGSGGGGSGGGGSGGGGSDVVMTQSPDSLAVSLGERATINCKSSQSLLDSDGKTYLNWLQQKPGQPPKRLISLVSKLDSGVPDRFSGSGSGTDFTLTISSLQAEDVAVYYCWQGTHFPGTFGGGTKVEIKTTTPAPRPPTPAPTIASQPLSLRPEACRPAAGGAVHTRGLDFACDIYIWAPLAGTCGVLLLSLVITLYCKRGRKKLLYIFKQPFMRPVQTTQEEDGCSCRFPEEEEGGCELRVKFSRSADAPAYKQGQNQLYNELNLGRREEYDVLDKRRGRDPEMGGKPRRKNPQEGLYNELQKDKMAEAYSEIGMKGERRRGKGHDGLYQGLSTATKDTYDALHMQALPPR

SEQ ID NO: 1364 - protein, 246 aa, Artificial Sequence
  source: /note="Description of Artificial Sequence: Synthetic polypeptide"
DVVMTQSPDSLAVSLGERATINCKSSQSLLDSDGKTYLNWLQQKPGQPPKRLISLVSKLDSGVPDRFSGSGSGTDFTLTISSLQAEDVAVYYCWQGTHFPGTFGGGTKVEIKGGGGSGGGGSGGGGSGGGGSEIQLVQSGAEVKKPGATVKISCKGSGFNIEDYYIHWVQQAPGKGLEWMGRIDPENDETKYGPIFQGRVTITADTSTNTVYMELSSLRSEDTAVYYCAFRGGVYWGQGTTVTVSS

SEQ ID NO: 1365 - DNA, 738 bp, Artificial Sequence
  source: /note="Description of Artificial Sequence: Synthetic polynucleotide"
gatgtcgtgatgacccagtccccagactccctcgcagtgtccttgggagaacgggccaccatcaactgcaaatcgagccagtcactgctggactcagacggaaagacctacctcaactggctgcagcagaagcctggccagccaccgaagcgcctgatctccctggtgtccaagctggactcgggcgtcccggacaggtttagcggtagcggctcgggaaccgacttcactctgaccattagctcgctccaagctgaagatgtggcggtctactactgctggcaggggacccacttccccgggacctttggcggaggaactaaagtcgaaatcaaaggaggaggcggatcaggtggaggaggcagcggaggaggagggagcggcggtggcggctccgaaattcaacttgtgcaatccggtgccgaggtgaagaaacctggtgccactgtcaagatctcgtgtaagggatcgggattcaatatcgaggactactacatccactgggtgcaacaggcgccaggaaagggattggagtggatgggtcgcatcgacccggaaaacgatgagactaagtacggaccgatcttccaaggccgggtcacgatcactgcggatacctccactaataccgtgtatatggagctctcgtcactgagaagcgaagatacggccgtgtactactgcgcattcagaggaggtgtgtactggggccagggaactactgtgaccgtgtcgtcg

SEQ ID NO: 1366 - DNA, 831 bp, Artificial Sequence
  source: /note="Description of Artificial Sequence: Synthetic polynucleotide"
atggccctccctgtcaccgccctgctgcttccgctggctcttctgctccacgccgctcggcccgatgtcgtgatgacccagtccccagactccctcgcagtgtccttgggagaacgggccaccatcaactgcaaatcgagccagtcactgctggactcagacggaaagacctacctcaactggctgcagcagaagcctggccagccaccgaagcgcctgatctccctggtgtccaagctggactcgggcgtcccggacaggtttagcggtagcggctcgggaaccgacttcactctgaccattagctcgctccaagctgaagatgtggcggtctactactgctggcaggggacccacttccccgggacctttggcggaggaactaaagtcgaaatcaaaggaggaggcggatcaggtggaggaggcagcggaggaggagggagcggcggtggcggctccgaaattcaacttgtgcaatccggtgccgaggtgaagaaacctggtgccactgtcaagatctcgtgtaagggatcgggattcaatatcgaggactactacatccactgggtgcaacaggcgccaggaaagggattggagtggatgggtcgcatcgacccggaaaacgatgagactaagtacggaccgatcttccaaggccgggtcacgatcactgcggatacctccactaataccgtgtatatggagctctcgtcactgagaagcgaagatacggccgtgtactactgcgcattcagaggaggtgtgtactggggccagggaactactgtgaccgtgtcgtcggggtcacatcaccaccatcatcatcaccac

SEQ ID NO: 1367 - protein, 277 aa, Artificial Sequence
  source: /note="Description of Artificial Sequence: Synthetic polypeptide"
MALPVTALLLPLALLLHAARPDVVMTQSPDSLAVSLGERATINCKSSQSLLDSDGKTYLNWLQQKPGQPPKRLISLVSKLDSGVPDRFSGSGSGTDFTLTISSLQAEDVAVYYCWQGTHFPGTFGGGTKVEIKGGGGSGGGGSGGGGSGGGGSEIQLVQSGAEVKKPGATVKISCKGSGFNIEDYYIHWVQQAPGKGLEWMGRIDPENDETKYGPIFQGRVTITADTSTNTVYMELSSLRSEDTAVYYCAFRGGVYWGQGTTVTVSSGSHHHHHHHH

SEQ ID NO: 1368 - DNA, 1470 bp, Artificial Sequence
  source: /note="Description of Artificial Sequence: Synthetic polynucleotide"
atggccctccctgtcaccgccctgctgcttccgctggctcttctgctccacgccgctcggcccgacgtggtcatgactcaaagcccagattccttggctgtctcccttggagaaagagcaacgatcaattgcaaaagctcgcagtccctgttggactccgatggaaaaacctacctcaactggctgcagcagaagccgggacaaccaccaaagcggctgatttccctcgtgtccaagctggacagcggcgtgccggatcgcttctcgggcagcggctcgggaaccgattttactctcactatttcgtcactgcaagcggaggacgtggcggtgtattactgctggcagggcactcacttcccgggtacttttggtggaggtaccaaagtcgaaatcaagggtggaggcgggagcggaggaggcgggtcgggaggaggaggatcgggtggcggaggctcagaaatccagctggtgcagtcaggtgccgaagtgaagaagcctggggccacggtgaagatctcgtgcaaggggagcggattcaacatcgaggattactacatccattgggtgcaacaggcccctggcaaagggctggaatggatgggaaggatcgaccccgagaatgacgagactaagtacggcccgatcttccaaggacgggtgaccatcactgcagacacttcaaccaacaccgtctacatggaactctcctcgctgcgctccgaggacaccgccgtgtactactgtgctttcagaggaggagtctactggggacagggaacgaccgtgaccgtcagctcaaccactaccccagcaccgaggccacccaccccggctcctaccatcgcctcccagcctctgtccctgcgtccggaggcatgtagacccgcagctggtggggccgtgcatacccggggtcttgacttcgcctgcgatatctacatttgggcccctctggctggtacttgcggggtcctgctgctttcactcgtgatcactctttactgtaagcgcggtcggaagaagctgctgtacatctttaagcaacccttcatgaggcctgtgcagactactcaagaggaggacggctgttcatgccggttcccagaggaggaggaaggcggctgcgaactgcgcgtgaaattcagccgcagcgcagatgctccagcctacaagcaggggcagaaccagctctacaacgaactcaatcttggtcggagagaggagtacgacgtgctggacaagcggagaggacgggacccagaaatgggcgggaagccgcgcagaaagaatccccaagagggcctgtacaacgagctccaaaaggataagatggcagaagcctatagcgagattggtatgaaaggggaacgcagaagaggcaaaggccacgacggactgtaccagggactcagcaccgccaccaaggacacctatgacgctcttcacatgcaggccctgccgcctcgg

SEQ ID NO: 1369 - protein, 490 aa, Artificial Sequence
  source: /note="Description of Artificial Sequence: Synthetic polypeptide"
MALPVTALLLPLALLLHAARPDVVMTQSPDSLAVSLGERATINCKSSQSLLDSDGKTYLNWLQQKPGQPPKRLISLVSKLDSGVPDRFSGSGSGTDFTLTISSLQAEDVAVYYCWQGTHFPGTFGGGTKVEIKGGGGSGGGGSGGGGSGGGGSEIQLVQSGAEVKKPGATVKISCKGSGFNIEDYYIHWVQQAPGKGLEWMGRIDPENDETKYGPIFQGRVTITADTSTNTVYMELSSLRSEDTAVYYCAFRGGVYWGQGTTVTVSSTTTPAPRPPTPAPTIASQPLSLRPEACRPAAGGAVHTRGLDFACDIYIWAPLAGTCGVLLLSLVITLYCKRGRKKLLYIFKQPFMRPVQTTQEEDGCSCRFPEEEEGGCELRVKFSRSADAPAYKQGQNQLYNELNLGRREEYDVLDKRRGRDPEMGGKPRRKNPQEGLYNELQKDKMAEAYSEIGMKGERRRGKGHDGLYQGLSTATKDTYDALHMQALPPR

SEQ ID NO: 1370 - protein, 246 aa, Artificial Sequence
  source: /note="Description of Artificial Sequence: Synthetic polypeptide"
EIQLVQSGAEVKKPGESLRISCKGSGFNIEDYYIHWVRQMPGKGLEWMGRIDPENDETKYGPIFQGHVTISADTSINTVYLQWSSLKASDTAMYYCAFRGGVYWGQGTTVTVSSGGGGSGGGGSGGGGSGGGGSDVVMTQSPLSLPVTLGQPASISCKSSQSLLDSDGKTYLNWLQQRPGQSPRRLISLVSKLDSGVPDRFSGSGSGTDFTLKISRVEAEDVGVYYCWQGTHFPGTFGGGTKVEIK

SEQ ID NO: 1371 - DNA, 738 bp, Artificial Sequence
  source: /note="Description of Artificial Sequence: Synthetic polynucleotide"
gagattcagctggtccaaagcggcgcagaagtgaaaaagccaggggaatcgttgcgcatcagctgtaaaggttccggcttcaacatcgaggactattacatccattgggtgcggcagatgccaggaaaggggctggaatggatgggacggattgacccggagaacgacgaaaccaagtacggaccgatctttcaaggacacgtgactatctccgccgacaccagcatcaatacggtgtacctccaatggtcctcactcaaggcctcggataccgcgatgtactactgcgcgttcagaggaggcgtctactggggacaagggactactgtgactgtctcatcaggaggtggaggaagcggaggaggtggctcgggcggaggtggatcgggaggaggagggtccgatgtggtgatgacccagtccccactgtcgctcccggtgaccctcggacagcctgctagcatctcgtgcaaatcctcgcaatccctgctggactcggacggaaaaacgtacctcaattggctgcagcagcgccctggccagagcccgagaaggcttatctcgctggtgtcaaagctggatagcggtgtgcccgaccggttcagcggctcagggtcaggaaccgatttcaccttgaagatctcccgcgtggaagccgaagatgtcggagtctactactgctggcagggtactcacttcccggggacctttggtggcggcactaaggtcgagattaag

SEQ ID NO: 1372 - DNA, 831 bp, Artificial Sequence
  source: /note="Description of Artificial Sequence: Synthetic polynucleotide"
atggccctccctgtcaccgccctgctgcttccgctggctcttctgctccacgccgctcggcccgagattcagctggtccaaagcggcgcagaagtgaaaaagccaggggaatcgttgcgcatcagctgtaaaggttccggcttcaacatcgaggactattacatccattgggtgcggcagatgccaggaaaggggctggaatggatgggacggattgacccggagaacgacgaaaccaagtacggaccgatctttcaaggacacgtgactatctccgccgacaccagcatcaatacggtgtacctccaatggtcctcactcaaggcctcggataccgcgatgtactactgcgcgttcagaggaggcgtctactggggacaagggactactgtgactgtctcatcaggaggtggaggaagcggaggaggtggctcgggcggaggtggatcgggaggaggagggtccgatgtggtgatgacccagtccccactgtcgctcccggtgaccctcggacagcctgctagcatctcgtgcaaatcctcgcaatccctgctggactcggacggaaaaacgtacctcaattggctgcagcagcgccctggccagagcccgagaaggcttatctcgctggtgtcaaagctggatagcggtgtgcccgaccggttcagcggctcagggtcaggaaccgatttcaccttgaagatctcccgcgtggaagccgaagatgtcggagtctactactgctggcagggtactcacttcccggggacctttggtggcggcactaaggtcgagattaagggctcacaccatcatcaccatcaccaccac

SEQ ID NO: 1373 - protein, 277 aa, Artificial Sequence
  source: /note="Description of Artificial Sequence: Synthetic polypeptide"
MALPVTALLLPLALLLHAARPEIQLVQSGAEVKKPGESLRISCKGSGFNIEDYYIHWVRQMPGKGLEWMGRIDPENDETKYGPIFQGHVTISADTSINTVYLQWSSLKASDTAMYYCAFRGGVYWGQGTTVTVSSGGGGSGGGGSGGGGSGGGGSDVVMTQSPLSLPVTLGQPASISCKSSQSLLDSDGKTYLNWLQQRPGQSPRRLISLVSKLDSGVPDRFSGSGSGTDFTLKISRVEAEDVGVYYCWQGTHFPGTFGGGTKVEIKGSHHHHHHHH

SEQ ID NO: 1374 - DNA, 1470 bp, Artificial Sequence
  source: /note="Description of Artificial Sequence: Synthetic polynucleotide"
atggccctccctgtcaccgccctgctgcttccgctggctcttctgctccacgccgctcggcccgaaatccagctggtgcaaagcggagccgaggtgaagaagcccggagaatccctgcgcatctcgtgtaagggttccggctttaacatcgaggattactacatccactgggtgagacagatgccgggcaaaggtctggaatggatgggccgcatcgacccggagaacgacgaaaccaaatacggaccaatcttccaaggacatgtgactatttccgcggatacctccatcaacactgtctacttgcagtggagctcgctcaaggcgtcggataccgccatgtactactgcgcattcagaggaggtgtgtactggggccagggcactacggtcaccgtgtcctcgggaggtggagggtcaggaggcggaggctcgggcggtggaggatcaggcggaggaggaagcgatgtggtcatgactcaatccccactgtcactgcctgtcactctggggcaaccggcttccatctcatgcaagtcaagccaatcgctgctcgactccgacggaaaaacctacctcaattggcttcagcagcgcccaggccagtcgcctcggaggctgatctcactcgtgtcgaagcttgactccggggtgccggatcggtttagcggaagcggatcggggaccgacttcacgttgaagattagccgggtggaagccgaggacgtgggagtctattactgctggcaggggacccacttcccggggactttcggaggaggcaccaaagtcgagattaagaccactaccccagcaccgaggccacccaccccggctcctaccatcgcctcccagcctctgtccctgcgtccggaggcatgtagacccgcagctggtggggccgtgcatacccggggtcttgacttcgcctgcgatatctacatttgggcccctctggctggtacttgcggggtcctgctgctttcactcgtgatcactctttactgtaagcgcggtcggaagaagctgctgtacatctttaagcaacccttcatgaggcctgtgcagactactcaagaggaggacggctgttcatgccggttcccagaggaggaggaaggcggctgcgaactgcgcgtgaaattcagccgcagcgcagatgctccagcctacaagcaggggcagaaccagctctacaacgaactcaatcttggtcggagagaggagtacgacgtgctggacaagcggagaggacgggacccagaaatgggcgggaagccgcgcagaaagaatccccaagagggcctgtacaacgagctccaaaaggataagatggcagaagcctatagcgagattggtatgaaaggggaacgcagaagaggcaaaggccacgacggactgtaccagggactcagcaccgccaccaaggacacctatgacgctcttcacatgcaggccctgccgcctcgg

SEQ ID NO: 1375 - protein, 490 aa, Artificial Sequence
  source: /note="Description of Artificial Sequence: Synthetic polypeptide"
MALPVTALLLPLALLLHAARPEIQLVQSGAEVKKPGESLRISCKGSGFNIEDYYIHWVRQMPGKGLEWMGRIDPENDETKYGPIFQGHVTISADTSINTVYLQWSSLKASDTAMYYCAFRGGVYWGQGTTVTVSSGGGGSGGGGSGGGGSGGGGSDVVMTQSPLSLPVTLGQPASISCKSSQSLLDSDGKTYLNWLQQRPGQSPRRLISLVSKLDSGVPDRFSGSGSGTDFTLKISRVEAEDVGVYYCWQGTHFPGTFGGGTKVEIKTTTPAPRPPTPAPTIASQPLSLRPEACRPAAGGAVHTRGLDFACDIYIWAPLAGTCGVLLLSLVITLYCKRGRKKLLYIFKQPFMRPVQTTQEEDGCSCRFPEEEEGGCELRVKFSRSADAPAYKQGQNQLYNELNLGRREEYDVLDKRRGRDPEMGGKPRRKNPQEGLYNELQKDKMAEAYSEIGMKGERRRGKGHDGLYQGLSTATKDTYDALHMQALPPR

SEQ ID NO: 1376 - protein, 246 aa, Artificial Sequence
  source: /note="Description of Artificial Sequence: Synthetic polypeptide"
DVVMTQSPLSLPVTLGQPASISCKSSQSLLDSDGKTYLNWLQQRPGQSPRRLISLVSKLDSGVPDRFSGSGSGTDFTLKISRVEAEDVGVYYCWQGTHFPGTFGGGTKVEIKGGGGSGGGGSGGGGSGGGGSEIQLVQSGAEVKKPGESLRISCKGSGFNIEDYYIHWVRQMPGKGLEWMGRIDPENDETKYGPIFQGHVTISADTSINTVYLQWSSLKASDTAMYYCAFRGGVYWGQGTTVTVSS

SEQ ID NO: 1377 - DNA, 738 bp, Artificial Sequence
  source: /note="Description of Artificial Sequence: Synthetic polynucleotide"
gacgtcgtcatgacccagagcccgctgtcactgcctgtgaccctgggccagccggcgtccattagctgcaaatcctcgcaatccctgctcgactcagacggaaaaacgtacttgaactggctccaacagcgccctgggcaatccccaaggcggcttatctcactcgtcagcaagctcgatagcggtgtcccagacagattttcgggctcgggatcgggcactgatttcactctgaagatctcgcgggtggaagccgaggatgtgggagtgtactattgctggcagggcactcacttccccgggacgtttggcggaggaactaaggtcgagatcaaaggaggaggtggatcaggcggaggtgggagcggaggaggaggaagcggtggtggaggttccgaaatccagctggtgcaatcaggagccgaggtgaagaagccgggagaatccctgcgcatctcgtgcaagggctcgggcttcaacatcgaggattactacatccactgggtgcggcagatgccgggaaaggggttggaatggatgggacgcattgacccggaaaatgatgaaaccaaatacgggccaatcttccaaggccacgtgaccattagcgctgacacttccatcaacaccgtgtaccttcagtggtcctcactgaaggcgtcggacactgccatgtactactgtgcattcagaggaggggtctactggggacagggcaccaccgtgaccgtgagctcc

SEQ ID NO: 1378 - DNA, 831 bp, Artificial Sequence
  source: /note="Description of Artificial Sequence: Synthetic polynucleotide"
atggccctccctgtcaccgccctgctgcttccgctggctcttctgctccacgccgctcggcccgacgtcgtcatgacccagagcccgctgtcactgcctgtgaccctgggccagccggcgtccattagctgcaaatcctcgcaatccctgctcgactcagacggaaaaacgtacttgaactggctccaacagcgccctgggcaatccccaaggcggcttatctcactcgtcagcaagctcgatagcggtgtcccagacagattttcgggctcgggatcgggcactgatttcactctgaagatctcgcgggtggaagccgaggatgtgggagtgtactattgctggcagggcactcacttccccgggacgtttggcggaggaactaaggtcgagatcaaaggaggaggtggatcaggcggaggtgggagcggaggaggaggaagcggtggtggaggttccgaaatccagctggtgcaatcaggagccgaggtgaagaagccgggagaatccctgcgcatctcgtgcaagggctcgggcttcaacatcgaggattactacatccactgggtgcggcagatgccgggaaaggggttggaatggatgggacgcattgacccggaaaatgatgaaaccaaatacgggccaatcttccaaggccacgtgaccattagcgctgacacttccatcaacaccgtgtaccttcagtggtcctcactgaaggcgtcggacactgccatgtactactgtgcattcagaggaggggtctactggggacagggcaccaccgtgaccgtgagctccggctcgcatcaccatcatcaccaccatcac

SEQ ID NO: 1379 - protein, 277 aa, Artificial Sequence
  source: /note="Description of Artificial Sequence: Synthetic polypeptide"
MALPVTALLLPLALLLHAARPDVVMTQSPLSLPVTLGQPASISCKSSQSLLDSDGKTYLNWLQQRPGQSPRRLISLVSKLDSGVPDRFSGSGSGTDFTLKISRVEAEDVGVYYCWQGTHFPGTFGGGTKVEIKGGGGSGGGGSGGGGSGGGGSEIQLVQSGAEVKKPGESLRISCKGSGFNIEDYYIHWVRQMPGKGLEWMGRIDPENDETKYGPIFQGHVTISADTSINTVYLQWSSLKASDTAMYYCAFRGGVYWGQGTTVTVSSGSHHHHHHHH

SEQ ID NO: 1380 - DNA, 1470 bp, Artificial Sequence
  source: /note="Description of Artificial Sequence: Synthetic polynucleotide"
atggccctccctgtcaccgccctgctgcttccgctggctcttctgctccacgccgctcggcccgacgtcgtcatgacccaatcccctctctccctgccggtcaccctgggtcagccggcgtcgatctcatgcaaaagctcacagtccctgctggattcggacggaaaaacctacttgaactggctccaacagaggccgggtcagtcccctcgcagactgatctcgctggtgagcaagctcgactcgggtgtgccggatcggttctccgggtcaggatcgggcaccgactttacgctcaagatttcgagagtggaggccgaggatgtgggagtgtactattgctggcagggcacgcatttccccgggacctttggaggcgggactaaggtggaaatcaagggaggtggcggatcaggcggaggaggcagcggcggaggtggatcaggaggcggagggtcagagatccagctggtccaaagcggagcagaggtgaagaagccaggcgagtcccttcgcatttcgtgcaaagggagcggcttcaacattgaagattactacatccactgggtgcggcaaatgccaggaaagggtctggaatggatgggacggatcgacccagaaaatgatgaaactaagtacggaccgatcttccaaggacacgtcactatctccgcggacacttcgatcaacaccgtgtacctccagtggagcagcttgaaagcctccgacaccgctatgtactactgtgccttccgcggaggagtctactggggacaggggactactgtgaccgtgtcgtccaccactaccccagcaccgaggccacccaccccggctcctaccatcgcctcccagcctctgtccctgcgtccggaggcatgtagacccgcagctggtggggccgtgcatacccggggtcttgacttcgcctgcgatatctacatttgggcccctctggctggtacttgcggggtcctgctgctttcactcgtgatcactctttactgtaagcgcggtcggaagaagctgctgtacatctttaagcaacccttcatgaggcctgtgcagactactcaagaggaggacggctgttcatgccggttcccagaggaggaggaaggcggctgcgaactgcgcgtgaaattcagccgcagcgcagatgctccagcctacaagcaggggcagaaccagctctacaacgaactcaatcttggtcggagagaggagtacgacgtgctggacaagcggagaggacgggacccagaaatgggcgggaagccgcgcagaaagaatccccaagagggcctgtacaacgagctccaaaaggataagatggcagaagcctatagcgagattggtatgaaaggggaacgcagaagaggcaaaggccacgacggactgtaccagggactcagcaccgccaccaaggacacctatgacgctcttcacatgcaggccctgccgcctcgg

SEQ ID NO: 1381 - protein, 490 aa, Artificial Sequence
  source: /note="Description of Artificial Sequence: Synthetic polypeptide"
MALPVTALLLPLALLLHAARPDVVMTQSPLSLPVTLGQPASISCKSSQSLLDSDGKTYLNWLQQRPGQSPRRLISLVSKLDSGVPDRFSGSGSGTDFTLKISRVEAEDVGVYYCWQGTHFPGTFGGGTKVEIKGGGGSGGGGSGGGGSGGGGSEIQLVQSGAEVKKPGESLRISCKGSGFNIEDYYIHWVRQMPGKGLEWMGRIDPENDETKYGPIFQGHVTISADTSINTVYLQWSSLKASDTAMYYCAFRGGVYWGQGTTVTVSSTTTPAPRPPTPAPTIASQPLSLRPEACRPAAGGAVHTRGLDFACDIYIWAPLAGTCGVLLLSLVITLYCKRGRKKLLYIFKQPFMRPVQTTQEEDGCSCRFPEEEEGGCELRVKFSRSADAPAYKQGQNQLYNELNLGRREEYDVLDKRRGRDPEMGGKPRRKNPQEGLYNELQKDKMAEAYSEIGMKGERRRGKGHDGLYQGLSTATKDTYDALHMQALPPR

SEQ ID NO: 1382 - protein, 246 aa, Artificial Sequence
  source: /note="Description of Artificial Sequence: Synthetic polypeptide"
EIQLVQSGAEVKKPGATVKISCKGSGFNIEDYYIHWVQQAPGKGLEWMGRIDPENDETKYGPIFQGRVTITADTSTNTVYMELSSLRSEDTAVYYCAFRGGVYWGQGTTVTVSSGGGGSGGGGSGGGGSGGGGSDVVMTQSPLSLPVTLGQPASISCKSSQSLLDSDGKTYLNWLQQRPGQSPRRLISLVSKLDSGVPDRFSGSGSGTDFTLKISRVEAEDVGVYYCWQGTHFPGTFGGGTKVEIK

SEQ ID NO: 1383 - DNA, 738 bp, Artificial Sequence
  source: /note="Description of Artificial Sequence: Synthetic polynucleotide"
gaaatccagctcgtgcagagcggagccgaggtcaagaaaccgggtgctaccgtgaagatttcatgcaagggatcgggcttcaacatcgaggattactacatccactgggtgcagcaggcaccaggaaaaggacttgaatggatgggccggatcgacccggaaaatgacgagactaagtacggccctatcttccaaggacgggtgacgatcaccgcagacactagcaccaacaccgtctatatggaactctcgtccctgaggtccgaagatactgccgtgtactactgtgcgtttcgcggaggtgtgtactggggacagggtaccaccgtcaccgtgtcatcgggcggtggaggctccggtggaggagggtcaggaggcggtggaagcggaggaggcggcagcgacgtggtcatgactcaatcgccgctgtcgctgcccgtcactctgggacaacccgcgtccatcagctgcaaatcctcgcagtcactgcttgactccgatggaaagacctacctcaactggctgcagcaacgcccaggccaatccccaagacgcctgatctcgttggtgtcaaagctggactcaggggtgccggaccggttctccgggagcgggtcgggcacggatttcactctcaagatctccagagtggaagccgaggatgtgggagtctactactgctggcagggaacccatttccctggaacttttggcggaggaactaaggtcgagattaaa

SEQ ID NO: 1384 - DNA, 831 bp, Artificial Sequence
  source: /note="Description of Artificial Sequence: Synthetic polynucleotide"
atggccctccctgtcaccgccctgctgcttccgctggctcttctgctccacgccgctcggcccgaaatccagctcgtgcagagcggagccgaggtcaagaaaccgggtgctaccgtgaagatttcatgcaagggatcgggcttcaacatcgaggattactacatccactgggtgcagcaggcaccaggaaaaggacttgaatggatgggccggatcgacccggaaaatgacgagactaagtacggccctatcttccaaggacgggtgacgatcaccgcagacactagcaccaacaccgtctatatggaactctcgtccctgaggtccgaagatactgccgtgtactactgtgcgtttcgcggaggtgtgtactggggacagggtaccaccgtcaccgtgtcatcgggcggtggaggctccggtggaggagggtcaggaggcggtggaagcggaggaggcggcagcgacgtggtcatgactcaatcgccgctgtcgctgcccgtcactctgggacaacccgcgtccatcagctgcaaatcctcgcagtcactgcttgactccgatggaaagacctacctcaactggctgcagcaacgcccaggccaatccccaagacgcctgatctcgttggtgtcaaagctggactcaggggtgccggaccggttctccgggagcgggtcgggcacggatttcactctcaagatctccagagtggaagccgaggatgtgggagtctactactgctggcagggaacccatttccctggaacttttggcggaggaactaaggtcgagattaaagggagccaccatcatcatcaccaccaccac

SEQ ID NO: 1385 - protein, 277 aa, Artificial Sequence
  source: /note="Description of Artificial Sequence: Synthetic polypeptide"
MALPVTALLLPLALLLHAARPEIQLVQSGAEVKKPGATVKISCKGSGFNIEDYYIHWVQQAPGKGLEWMGRIDPENDETKYGPIFQGRVTITADTSTNTVYMELSSLRSEDTAVYYCAFRGGVYWGQGTTVTVSSGGGGSGGGGSGGGGSGGGGSDVVMTQSPLSLPVTLGQPASISCKSSQSLLDSDGKTYLNWLQQRPGQSPRRLISLVSKLDSGVPDRFSGSGSGTDFTLKISRVEAEDVGVYYCWQGTHFPGTFGGGTKVEIKGSHHHHHHHH

SEQ ID NO: 1386 - DNA, 1470 bp, Artificial Sequence
  source: /note="Description of Artificial Sequence: Synthetic polynucleotide"
atggccctccctgtcaccgccctgctgcttccgctggctcttctgctccacgccgctcggcccgaaatccagctcgtgcagagcggagccgaggtcaagaaaccgggtgctaccgtgaagatttcatgcaagggatcgggcttcaacatcgaggattactacatccactgggtgcagcaggcaccaggaaaaggacttgaatggatgggccggatcgacccggaaaatgacgagactaagtacggccctatcttccaaggacgggtgacgatcaccgcagacactagcaccaacaccgtctatatggaactctcgtccctgaggtccgaagatactgccgtgtactactgtgcgtttcgcggaggtgtgtactggggacagggtaccaccgtcaccgtgtcatcgggcggtggaggctccggtggaggagggtcaggaggcggtggaagcggaggaggcggcagcgacgtggtcatgactcaatcgccgctgtcgctgcccgtcactctgggacaacccgcgtccatcagctgcaaatcctcgcagtcactgcttgactccgatggaaagacctacctcaactggctgcagcaacgcccaggccaatccccaagacgcctgatctcgttggtgtcaaagctggactcaggggtgccggaccggttctccgggagcgggtcgggcacggatttcactctcaagatctccagagtggaagccgaggatgtgggagtctactactgctggcagggaacccatttccctggaacttttggcggaggaactaaggtcgagattaaaaccactaccccagcaccgaggccacccaccccggctcctaccatcgcctcccagcctctgtccctgcgtccggaggcatgtagacccgcagctggtggggccgtgcatacccggggtcttgacttcgcctgcgatatctacatttgggcccctctggctggtacttgcggggtcctgctgctttcactcgtgatcactctttactgtaagcgcggtcggaagaagctgctgtacatctttaagcaacccttcatgaggcctgtgcagactactcaagaggaggacggctgttcatgccggttcccagaggaggaggaaggcggctgcgaactgcgcgtgaaattcagccgcagcgcagatgctccagcctacaagcaggggcagaaccagctctacaacgaactcaatcttggtcggagagaggagtacgacgtgctggacaagcggagaggacgggacccagaaatgggcgggaagccgcgcagaaagaatccccaagagggcctgtacaacgagctccaaaaggataagatggcagaagcctatagcgagattggtatgaaaggggaacgcagaagaggcaaaggccacgacggactgtaccagggactcagcaccgccaccaaggacacctatgacgctcttcacatgcaggccctgccgcctcgg

SEQ ID NO: 1387 - protein, 490 aa, Artificial Sequence
  source: /note="Description of Artificial Sequence: Synthetic polypeptide"
MALPVTALLLPLALLLHAARPEIQLVQSGAEVKKPGATVKISCKGSGFNIEDYYIHWVQQAPGKGLEWMGRIDPENDETKYGPIFQGRVTITADTSTNTVYMELSSLRSEDTAVYYCAFRGGVYWGQGTTVTVSSGGGGSGGGGSGGGGSGGGGSDVVMTQSPLSLPVTLGQPASISCKSSQSLLDSDGKTYLNWLQQRPGQSPRRLISLVSKLDSGVPDRFSGSGSGTDFTLKISRVEAEDVGVYYCWQGTHFPGTFGGGTKVEIKTTTPAPRPPTPAPTIASQPLSLRPEACRPAAGGAVHTRGLDFACDIYIWAPLAGTCGVLLLSLVITLYCKRGRKKLLYIFKQPFMRPVQTTQEEDGCSCRFPEEEEGGCELRVKFSRSADAPAYKQGQNQLYNELNLGRREEYDVLDKRRGRDPEMGGKPRRKNPQEGLYNELQKDKMAEAYSEIGMKGERRRGKGHDGLYQGLSTATKDTYDALHMQALPPR

SEQ ID NO: 1388 - protein, 246 aa, Artificial Sequence
  source: /note="Description of Artificial Sequence: Synthetic polypeptide"
EIQLVQSGAEVKKPGESLRISCKGSGFNIEDYYIHWVRQMPGKGLEWMGRIDPENDETKYGPIFQGHVTISADTSINTVYLQWSSLKASDTAMYYCAFRGGVYWGQGTTVTVSSGGGGSGGGGSGGGGSGGGGSDVVMTQSPDSLAVSLGERATINCKSSQSLLDSDGKTYLNWLQQKPGQPPKRLISLVSKLDSGVPDRFSGSGSGTDFTLTISSLQAEDVAVYYCWQGTHFPGTFGGGTKVEIK

SEQ ID NO: 1389 - DNA, 738 bp, Artificial Sequence
  source: /note="Description of Artificial Sequence: Synthetic polynucleotide"
gaaatccagctggtgcagtcaggcgccgaggtcaagaagccgggagagtcgctgagaatctcgtgcaagggctcggggttcaacatcgaggactactacattcactgggtcaggcagatgccgggaaagggactggaatggatgggccggatcgacccagaaaatgacgaaaccaaatacgggccgatttttcaaggccacgtgactatcagcgcagacacgagcatcaacactgtctacctccagtggtcctcgcttaaggccagcgataccgctatgtactactgcgcattcagaggcggggtgtactggggacaaggaaccactgtgaccgtgagcagcggaggtggcggctcgggaggaggtgggagcggaggaggaggttccggcggtggaggatcagatgtcgtgatgacccagtccccggactccctcgctgtctcactgggcgagcgcgcgaccatcaactgcaaatcgagccagtcgctgttggactccgatggaaagacttatctgaattggctgcaacagaaaccaggacaacctcccaagcggctcatctcgcttgtgtcaaaactcgattcgggagtgccagaccgcttctcggggtccgggagcggaactgactttactttgaccatttcctcactgcaagcggaggatgtggccgtgtattactgttggcagggcacgcatttccctggaaccttcggtggcggaactaaggtggaaatcaag

SEQ ID NO: 1390 - DNA, 834 bp, Artificial Sequence
  source: /note="Description of Artificial Sequence: Synthetic polynucleotide"
atggccctccctgtcaccgccctgctgcttccgctggctcttctgctccacgccgctcggcccgaaatccagctggtgcagtcaggcgccgaggtcaagaagccgggagagtcgctgagaatctcgtgcaagggctcggggttcaacatcgaggactactacattcactgggtcaggcagatgccgggaaagggactggaatggatgggccggatcgacccagaaaatgacgaaaccaaatacgggccgatttttcaaggccacgtgactatcagcgcagacacgagcatcaacactgtctacctccagtggtcctcgcttaaggccagcgataccgctatgtactactgcgcattcagaggcggggtgtactggggacaaggaaccactgtgaccgtgagcagcggaggtggcggctcgggaggaggtgggagcggaggaggaggttccggcggtggaggatcagatgtcgtgatgacccagtccccggactccctcgctgtctcactgggcgagcgcgcgaccatcaactgcaaatcgagccagtcgctgttggactccgatggaaagacttatctgaattggctgcaacagaaaccaggacaacctcccaagcggctcatctcgcttgtgtcaaaactcgattcgggagtgccagaccgcttctcggggtccgggagcggaactgactttactttgaccatttcctcactgcaagcggaggatgtggccgtgtattactgttggcagggcacgcatttccctggaaccttcggtggcggaactaaggtggaaatcaagggatcacaccaccatcatcaccatcaccaccat

SEQ ID NO: 1391 - protein, 278 aa, Artificial Sequence
  source: /note="Description of Artificial Sequence: Synthetic polypeptide"
MALPVTALLLPLALLLHAARPEIQLVQSGAEVKKPGESLRISCKGSGFNIEDYYIHWVRQMPGKGLEWMGRIDPENDETKYGPIFQGHVTISADTSINTVYLQWSSLKASDTAMYYCAFRGGVYWGQGTTVTVSSGGGGSGGGGSGGGGSGGGGSDVVMTQSPDSLAVSLGERATINCKSSQSLLDSDGKTYLNWLQQKPGQPPKRLISLVSKLDSGVPDRFSGSGSGTDFTLTISSLQAEDVAVYYCWQGTHFPGTFGGGTKVEIKGSHHHHHHHHH

SEQ ID NO: 1392 - DNA, 1470 bp, Artificial Sequence
  source: /note="Description of Artificial Sequence: Synthetic polynucleotide"
atggccctccctgtcaccgccctgctgcttccgctggctcttctgctccacgccgctcggcccgagattcagctcgtgcaatcgggagcggaagtcaagaagccaggagagtccttgcggatctcatgcaagggtagcggctttaacatcgaggattactacatccactgggtgaggcagatgccggggaagggactcgaatggatgggacggatcgacccagaaaacgacgaaactaagtacggtccgatcttccaaggccatgtgactattagcgccgatacttcaatcaataccgtgtatctgcaatggtcctcattgaaagcctcagataccgcgatgtactactgtgctttcagaggaggggtctactggggacagggaactaccgtgactgtctcgtccggcggaggcgggtcaggaggtggcggcagcggaggaggagggtccggcggaggtgggtccgacgtcgtgatgacccagagccctgacagcctggcagtgagcctgggcgaaagagctaccattaactgcaaatcgtcgcagagcctgctggactcggacggaaaaacgtacctcaattggctgcagcaaaagcctggccagccaccgaagcgccttatctcactggtgtcgaagctggattcgggagtgcccgatcgcttctccggctcgggatcgggtactgacttcaccctcactatctcctcgcttcaagcagaggacgtggccgtctactactgctggcagggaacccactttccgggaaccttcggcggagggacgaaagtggagatcaagaccactaccccagcaccgaggccacccaccccggctcctaccatcgcctcccagcctctgtccctgcgtccggaggcatgtagacccgcagctggtggggccgtgcatacccggggtcttgacttcgcctgcgatatctacatttgggcccctctggctggtacttgcggggtcctgctgctttcactcgtgatcactctttactgtaagcgcggtcggaagaagctgctgtacatctttaagcaacccttcatgaggcctgtgcagactactcaagaggaggacggctgttcatgccggttcccagaggaggaggaaggcggctgcgaactgcgcgtgaaattcagccgcagcgcagatgctccagcctacaagcaggggcagaaccagctctacaacgaactcaatcttggtcggagagaggagtacgacgtgctggacaagcggagaggacgggacccagaaatgggcgggaagccgcgcagaaagaatccccaagagggcctgtacaacgagctccaaaaggataagatggcagaagcctatagcgagattggtatgaaaggggaacgcagaagaggcaaaggccacgacggactgtaccagggactcagcaccgccaccaaggacacctatgacgctcttcacatgcaggccctgccgcctcgg

SEQ ID NO: 1393 - protein, 490 aa, Artificial Sequence
  source: /note="Description of Artificial Sequence: Synthetic polypeptide"
MALPVTALLLPLALLLHAARPEIQLVQSGAEVKKPGESLRISCKGSGFNIEDYYIHWVRQMPGKGLEWMGRIDPENDETKYGPIFQGHVTISADTSINTVYLQWSSLKASDTAMYYCAFRGGVYWGQGTTVTVSSGGGGSGGGGSGGGGSGGGGSDVVMTQSPDSLAVSLGERATINCKSSQSLLDSDGKTYLNWLQQKPGQPPKRLISLVSKLDSGVPDRFSGSGSGTDFTLTISSLQAEDVAVYYCWQGTHFPGTFGGGTKVEIKTTTPAPRPPTPAPTIASQPLSLRPEACRPAAGGAVHTRGLDFACDIYIWAPLAGTCGVLLLSLVITLYCKRGRKKLLYIFKQPFMRPVQTTQEEDGCSCRFPEEEEGGCELRVKFSRSADAPAYKQGQNQLYNELNLGRREEYDVLDKRRGRDPEMGGKPRRKNPQEGLYNELQKDKMAEAYSEIGMKGERRRGKGHDGLYQGLSTATKDTYDALHMQALPPR

SEQ ID NO: 1394 - protein, 246 aa, Artificial Sequence
  source: /note="Description of Artificial Sequence: Synthetic polypeptide"
DVVMTQSPDSLAVSLGERATINCKSSQSLLDSDGKTYLNWLQQKPGQPPKRLISLVSKLDSGVPDRFSGSGSGTDFTLTISSLQAEDVAVYYCWQGTHFPGTFGGGTKVEIKGGGGSGGGGSGGGGSGGGGSEIQLVQSGAEVKKPGESLRISCKGSGFNIEDYYIHWVRQMPGKGLEWMGRIDPENDETKYGPIFQGHVTISADTSINTVYLQWSSLKASDTAMYYCAFRGGVYWGQGTTVTVSS

SEQ ID NO: 1395 - DNA, 738 bp, Artificial Sequence
  source: /note="Description of Artificial Sequence: Synthetic polynucleotide"
gacgtggtgatgacccaatcgccagattccctggcagtgtccctgggcgaacgcgccactattaactgcaaatcgtcacagtccttgcttgattccgacggaaagacctacctcaattggctccagcagaagccaggacaaccgccaaagagactgatctccctggtgtcaaagctggactcgggagtgcctgatcggttctcgggtagcgggagcggcaccgacttcactctgaccatctcgtcactccaggctgaggacgtggccgtgtattactgttggcagggtactcactttccgggcactttcggaggcggcaccaaggtggagattaaaggaggaggcggaagcggaggtggaggatcgggaggtggtgggagcggcggaggagggagcgagatccagctcgtccaatcgggagcggaagtgaagaagcccggagagtcacttagaatctcatgcaaggggtcgggcttcaacatcgaggattactacatccattgggtccgccagatgcctggtaaaggactggaatggatggggaggattgacccggaaaacgacgaaactaagtacggaccgatctttcaagggcacgtgactatctccgctgatacctcaatcaatactgtctacctccagtggtcctcgctgaaagcaagcgacaccgcgatgtactactgcgccttccggggaggagtgtactggggccaaggcaccacggtcacggtcagctcc

SEQ ID NO: 1396 - DNA, 834 bp, Artificial Sequence
  source: /note="Description of Artificial Sequence: Synthetic polynucleotide"
atggccctccctgtcaccgccctgctgcttccgctggctcttctgctccacgccgctcggcccgacgtggtgatgacccaatcgccagattccctggcagtgtccctgggcgaacgcgccactattaactgcaaatcgtcacagtccttgcttgattccgacggaaagacctacctcaattggctccagcagaagccaggacaaccgccaaagagactgatctccctggtgtcaaagctggactcgggagtgcctgatcggttctcgggtagcgggagcggcaccgacttcactctgaccatctcgtcactccaggctgaggacgtggccgtgtattactgttggcagggtactcactttccgggcactttcggaggcggcaccaaggtggagattaaaggaggaggcggaagcggaggtggaggatcgggaggtggtgggagcggcggaggagggagcgagatccagctcgtccaatcgggagcggaagtgaagaagcccggagagtcacttagaatctcatgcaaggggtcgggcttcaacatcgaggattactacatccattgggtccgccagatgcctggtaaaggactggaatggatggggaggattgacccggaaaacgacgaaactaagtacggaccgatctttcaagggcacgtgactatctccgctgatacctcaatcaatactgtctacctccagtggtcctcgctgaaagcaagcgacaccgcgatgtactactgcgccttccggggaggagtgtactggggccaaggcaccacggtcacggtcagctccggctcccatcaccaccaccatcaccatcatcac

SEQ ID NO: 1397 - protein, 278 aa, Artificial Sequence
  source: /note="Description of Artificial Sequence: Synthetic polypeptide"
MALPVTALLLPLALLLHAARPDVVMTQSPDSLAVSLGERATINCKSSQSLLDSDGKTYLNWLQQKPGQPPKRLISLVSKLDSGVPDRFSGSGSGTDFTLTISSLQAEDVAVYYCWQGTHFPGTFGGGTKVEIKGGGGSGGGGSGGGGSGGGGSEIQLVQSGAEVKKPGESLRISCKGSGFNIEDYYIHWVRQMPGKGLEWMGRIDPENDETKYGPIFQGHVTISADTSINTVYLQWSSLKASDTAMYYCAFRGGVYWGQGTTVTVSSGSHHHHHHHHH

SEQ ID NO: 1398 - DNA, 1470 bp, Artificial Sequence
  source: /note="Description of Artificial Sequence: Synthetic polynucleotide"
atggccctccctgtcaccgccctgctgcttccgctggctcttctgctccacgccgctcggcccgacgtggtgatgactcagtcgcctgactcgctggctgtgtcccttggagagcgggccactatcaattgcaagtcatcccagtcgctgctggattccgacgggaaaacctacctcaattggctgcagcaaaaaccgggacagcctccaaagcggctcatcagcctggtgtccaagttggacagcggcgtgccagaccgcttctccggttcgggaagcggtactgatttcacgctgaccatctcatccctccaagcggaggatgtggcagtctactactgttggcagggcacgcattttccgggcacttttggaggagggaccaaggtcgaaatcaagggaggaggtggctcgggcggaggaggctcgggaggaggaggatcaggaggcggtggaagcgagattcaactggtccagagcggcgcagaagtcaagaagccgggtgaatcgctcagaatctcgtgcaaaggatcgggattcaacatcgaggactactacattcactgggtcagacaaatgccgggcaaagggctggaatggatggggaggatcgaccccgaaaacgatgaaaccaagtacggaccaatcttccaagggcacgtgaccatttcggcggacacctcaatcaacactgtgtacctccagtggagctcacttaaggccagcgataccgccatgtactattgcgctttccgcggaggggtgtactggggacagggcactactgtgaccgtgtcatccaccactaccccagcaccgaggccacccaccccggctcctaccatcgcctcccagcctctgtccctgcgtccggaggcatgtagacccgcagctggtggggccgtgcatacccggggtcttgacttcgcctgcgatatctacatttgggcccctctggctggtacttgcggggtcctgctgctttcactcgtgatcactctttactgtaagcgcggtcggaagaagctgctgtacatctttaagcaacccttcatgaggcctgtgcagactactcaagaggaggacggctgttcatgccggttcccagaggaggaggaaggcggctgcgaactgcgcgtgaaattcagccgcagcgcagatgctccagcctacaagcaggggcagaaccagctctacaacgaactcaatcttggtcggagagaggagtacgacgtgctggacaagcggagaggacgggacccagaaatgggcgggaagccgcgcagaaagaatccccaagagggcctgtacaacgagctccaaaaggataagatggcagaagcctatagcgagattggtatgaaaggggaacgcagaagaggcaaaggccacgacggactgtaccagggactcagcaccgccaccaaggacacctatgacgctcttcacatgcaggccctgccgcctcgg

SEQ ID NO: 1399 - protein, 490 aa, Artificial Sequence
  source: /note="Description of Artificial Sequence: Synthetic polypeptide"
MALPVTALLLPLALLLHAARPDVVMTQSPDSLAVSLGERATINCKSSQSLLDSDGKTYLNWLQQKPGQPPKRLISLVSKLDSGVPDRFSGSGSGTDFTLTISSLQAEDVAVYYCWQGTHFPGTFGGGTKVEIKGGGGSGGGGSGGGGSGGGGSEIQLVQSGAEVKKPGESLRISCKGSGFNIEDYYIHWVRQMPGKGLEWMGRIDPENDETKYGPIFQGHVTISADTSINTVYLQWSSLKASDTAMYYCAFRGGVYWGQGTTVTVSSTTTPAPRPPTPAPTIASQPLSLRPEACRPAAGGAVHTRGLDFACDIYIWAPLAGTCGVLLLSLVITLYCKRGRKKLLYIFKQPFMRPVQTTQEEDGCSCRFPEEEEGGCELRVKFSRSADAPAYKQGQNQLYNELNLGRREEYDVLDKRRGRDPEMGGKPRRKNPQEGLYNELQKDKMAEAYSEIGMKGERRRGKGHDGLYQGLSTATKDTYDALHMQALPPR

SEQ ID NO: 1400 - protein, 246 aa, Artificial Sequence
  source: /note="Description of Artificial Sequence: Synthetic polypeptide"
DVVMTQSPLSLPVTLGQPASISCKSSQSLLDSDGKTYLNWLQQRPGQSPRRLISLVSKLDSGVPDRFSGSGSGTDFTLKISRVEAEDVGVYYCWQGTHFPGTFGGGTKVEIKGGGGSGGGGSGGGGSGGGGSEIQLVQSGAEVKKPGATVKISCKGSGFNIEDYYIHWVQQAPGKGLEWMGRIDPENDETKYGPIFQGRVTITADTSTNTVYMELSSLRSEDTAVYYCAFRGGVYWGQGTTVTVSS

SEQ ID NO: 1401 - DNA, 738 bp, Artificial Sequence
  source: /note="Description of Artificial Sequence: Synthetic polynucleotide"
gatgtggtcatgacgcagtcaccactgtccctccccgtgacccttggacagccagcgtcgattagctgcaagtcatcccaatccctgctcgattcggatggaaagacctatctcaactggctgcagcaaagacccggtcagagccctaggagactcatctcgttggtgtcaaagctggacagcggagtgccggaccggttttccggttcgggatcggggacggacttcactctgaagatttcacgggtggaagctgaggatgtgggagtgtactactgctggcagggaacccatttccctggcacttttggcggaggaactaaggtcgaaatcaagggaggaggtggctcgggaggaggcggatcgggcggaggcgggagcggcggaggagggtccgaaatccaacttgtccagtcaggagccgaagtgaagaaaccgggagccaccgtcaaaatcagctgtaagggatcgggattcaatatcgaggactactacatccactgggtgcagcaagctccgggcaaaggactggagtggatggggcgcatcgacccagagaacgacgaaaccaaatacggcccgatcttccaagggcgggtgaccatcaccgcggacacctcaactaacactgtgtacatggagctgagctccctgcgctccgaagatactgcagtctactactgcgccttccgcggtggtgtgtactggggacagggcaccactgtgactgtcagctcg

SEQ ID NO: 1402 - DNA, 831 bp, Artificial Sequence
  source: /note="Description of Artificial Sequence: Synthetic polynucleotide"
atggccctccctgtcaccgccctgctgcttccgctggctcttctgctccacgccgctcggcccgatgtggtcatgacgcagtcaccactgtccctccccgtgacccttggacagccagcgtcgattagctgcaagtcatcccaatccctgctcgattcggatggaaagacctatctcaactggctgcagcaaagacccggtcagagccctaggagactcatctcgttggtgtcaaagctggacagcggagtgccggaccggttttccggttcgggatcggggacggacttcactctgaagatttcacgggtggaagctgaggatgtgggagtgtactactgctggcagggaacccatttccctggcacttttggcggaggaactaaggtcgaaatcaagggaggaggtggctcgggaggaggcggatcgggcggaggcgggagcggcggaggagggtccgaaatccaacttgtccagtcaggagccgaagtgaagaaaccgggagccaccgtcaaaatcagctgtaagggatcgggattcaatatcgaggactactacatccactgggtgcagcaagctccgggcaaaggactggagtggatggggcgcatcgacccagagaacgacgaaaccaaatacggcccgatcttccaagggcgggtgaccatcaccgcggacacctcaactaacactgtgtacatggagctgagctccctgcgctccgaagatactgcagtctactactgcgccttccgcggtggtgtgtactggggacagggcaccactgtgactgtcagctcggggtcccaccatcatcaccaccaccatcac

SEQ ID NO: 1403 - protein, 277 aa, Artificial Sequence
  source: /note="Description of Artificial Sequence: Synthetic polypeptide"
MALPVTALLLPLALLLHAARPDVVMTQSPLSLPVTLGQPASISCKSSQSLLDSDGKTYLNWLQQRPGQSPRRLISLVSKLDSGVPDRFSGSGSGTDFTLKISRVEAEDVGVYYCWQGTHFPGTFGGGTKVEIKGGGGSGGGGSGGGGSGGGGSEIQLVQSGAEVKKPGATVKISCKGSGFNIEDYYIHWVQQAPGKGLEWMGRIDPENDETKYGPIFQGRVTITADTSTNTVYMELSSLRSEDTAVYYCAFRGGVYWGQGTTVTVSSGSHHHHHHHH

SEQ ID NO: 1404 - DNA, 1470 bp, Artificial Sequence
  source: /note="Description of Artificial Sequence: Synthetic polynucleotide"
atggccctccctgtcaccgccctgctgcttccgctggctcttctgctccacgccgctcggcccgatgtggtcatgacgcagtcaccactgtccctccccgtgacccttggacagccagcgtcgattagctgcaagtcatcccaatccctgctcgattcggatggaaagacctatctcaactggctgcagcaaagacccggtcagagccctaggagactcatctcgttggtgtcaaagctggacagcggagtgccggaccggttttccggttcgggatcggggacggacttcactctgaagatttcacgggtggaagctgaggatgtgggagtgtactactgctggcagggaacccatttccctggcacttttggcggaggaactaaggtcgaaatcaagggaggaggtggctcgggaggaggcggatcgggcggaggcgggagcggcggaggagggtccgaaatccaacttgtccagtcaggagccgaagtgaagaaaccgggagccaccgtcaaaatcagctgtaagggatcgggattcaatatcgaggactactacatccactgggtgcagcaagctccgggcaaaggactggagtggatggggcgcatcgacccagagaacgacgaaaccaaatacggcccgatcttccaagggcgggtgaccatcaccgcggacacctcaactaacactgtgtacatggagctgagctccctgcgctccgaagatactgcagtctactactgcgccttccgcggtggtgtgtactggggacagggcaccactgtgactgtcagctcgaccactaccccagcaccgaggccacccaccccggctcctaccatcgcctcccagcctctgtccctgcgtccggaggcatgtagacccgcagctggtggggccgtgcatacccggggtcttgacttcgcctgcgatatctacatttgggcccctctggctggtacttgcggggtcctgctgctttcactcgtgatcactctttactgtaagcgcggtcggaagaagctgctgtacatctttaagcaacccttcatgaggcctgtgcagactactcaagaggaggacggctgttcatgccggttcccagaggaggaggaaggcggctgcgaactgcgcgtgaaattcagccgcagcgcagatgctccagcctacaagcaggggcagaaccagctctacaacgaactcaatcttggtcggagagaggagtacgacgtgctggacaagcggagaggacgggacccagaaatgggcgggaagccgcgcagaaagaatccccaagagggcctgtacaacgagctccaaaaggataagatggcagaagcctatagcgagattggtatgaaaggggaacgcagaagaggcaaaggccacgacggactgtaccagggactcagcaccgccaccaaggacacctatgacgctcttcacatgcaggccctgccgcctcgg

SEQ ID NO: 1405 - protein, 490 aa, Artificial Sequence
  source: /note="Description of Artificial Sequence: Synthetic polypeptide"
MALPVTALLLPLALLLHAARPDVVMTQSPLSLPVTLGQPASISCKSSQSLLDSDGKTYLNWLQQRPGQSPRRLISLVSKLDSGVPDRFSGSGSGTDFTLKISRVEAEDVGVYYCWQGTHFPGTFGGGTKVEIKGGGGSGGGGSGGGGSGGGGSEIQLVQSGAEVKKPGATVKISCKGSGFNIEDYYIHWVQQAPGKGLEWMGRIDPENDETKYGPIFQGRVTITADTSTNTVYMELSSLRSEDTAVYYCAFRGGVYWGQGTTVTVSSTTTPAPRPPTPAPTIASQPLSLRPEACRPAAGGAVHTRGLDFACDIYIWAPLAGTCGVLLLSLVITLYCKRGRKKLLYIFKQPFMRPVQTTQEEDGCSCRFPEEEEGGCELRVKFSRSADAPAYKQGQNQLYNELNLGRREEYDVLDKRRGRDPEMGGKPRRKNPQEGLYNELQKDKMAEAYSEIGMKGERRRGKGHDGLYQGLSTATKDTYDALHMQALPPR

SEQ ID NO: 1406 - protein, 243 aa, Artificial Sequence
  source: /note="Description of Artificial Sequence: Synthetic polypeptide"
EIQLQQSGAELVKPGASVKLSCTGSGFNIEDYYIHWVKQRTEQGLEWIGRIDPENDETKYGPIFQGRATITADTSSNTVYLQLSSLTSEDTAVYYCAFRGGVYWGPGTTLTVSSGGGGSGGGGSGGGGSHMDVVMTQSPLTLSVAIGQSASISCKSSQSLLDSDGKTYLNWLLQRPGQSPKRLISLVSKLDSGVPDRFTGSGSGTDFTLRISRVEAEDLGIYYCWQGTHFPGTFGGGTKLEIK

SEQ ID NO: 1407 - DNA, 729 bp, Artificial Sequence
  source: /note="Description of Artificial Sequence: Synthetic polynucleotide"
gagatccagctccaacagagcggagccgaactggtcaaaccgggagcgtcggtgaagttgtcatgcactggatcgggcttcaacatcgaggattactacatccactgggtcaagcaacgcaccgagcaggggctggaatggatcggacggatcgaccccgaaaacgatgaaaccaagtacgggcctatcttccaaggacgggccaccattacggctgacacgtcaagcaataccgtctacctccagctttccagcctgacctccgaggacactgccgtgtactactgcgccttcagaggaggcgtgtactggggaccaggaaccactttgaccgtgtccagcggaggcggtggatcaggaggaggaggctcaggcggtggcggctcgcacatggacgtggtcatgactcagtccccgctgaccctgtcggtggcaattggacagagcgcatccatctcgtgcaagagctcacagtcgctgctggattccgacggaaagacttatctgaactggctgctccaaagaccagggcaatcaccgaaacgccttatctccctggtgtcgaaactcgactcgggtgtgccggatcggtttaccggtagcgggtccggcacggacttcactctccgcatttcgagggtggaagcggaggatctcgggatctactactgttggcagggaacccacttccctgggacttttggaggcggaactaagctggaaatcaag

SEQ ID NO: 1408 - DNA, 822 bp, Artificial Sequence
  source: /note="Description of Artificial Sequence: Synthetic polynucleotide"
atggccctccctgtcaccgccctgctgcttccgctggctcttctgctccacgccgctcggcccgagatccagctccaacagagcggagccgaactggtcaaaccgggagcgtcggtgaagttgtcatgcactggatcgggcttcaacatcgaggattactacatccactgggtcaagcaacgcaccgagcaggggctggaatggatcggacggatcgaccccgaaaacgatgaaaccaagtacgggcctatcttccaaggacgggccaccattacggctgacacgtcaagcaataccgtctacctccagctttccagcctgacctccgaggacactgccgtgtactactgcgccttcagaggaggcgtgtactggggaccaggaaccactttgaccgtgtccagcggaggcggtggatcaggaggaggaggctcaggcggtggcggctcgcacatggacgtggtcatgactcagtccccgctgaccctgtcggtggcaattggacagagcgcatccatctcgtgcaagagctcacagtcgctgctggattccgacggaaagacttatctgaactggctgctccaaagaccagggcaatcaccgaaacgccttatctccctggtgtcgaaactcgactcgggtgtgccggatcggtttaccggtagcgggtccggcacggacttcactctccgcatttcgagggtggaagcggaggatctcgggatctactactgttggcagggaacccacttccctgggacttttggaggcggaactaagctggaaatcaagggtagccatcaccatcaccaccaccatcat

SEQ ID NO: 1409 - protein, 274 aa, Artificial Sequence
  source: /note="Description of Artificial Sequence: Synthetic polypeptide"
MALPVTALLLPLALLLHAARPEIQLQQSGAELVKPGASVKLSCTGSGFNIEDYYIHWVKQRTEQGLEWIGRIDPENDETKYGPIFQGRATITADTSSNTVYLQLSSLTSEDTAVYYCAFRGGVYWGPGTTLTVSSGGGGSGGGGSGGGGSHMDVVMTQSPLTLSVAIGQSASISCKSSQSLLDSDGKTYLNWLLQRPGQSPKRLISLVSKLDSGVPDRFTGSGSGTDFTLRISRVEAEDLGIYYCWQGTHFPGTFGGGTKLEIKGSHHHHHHHH

SEQ ID NO: 1410 - DNA, 1461 bp, Artificial Sequence
  source: /note="Description of Artificial Sequence: Synthetic polynucleotide"
atggccctccctgtcaccgccctgctgcttccgctggctcttctgctccacgccgctcggcccgagatccagctccaacagagcggagccgaactggtcaaaccgggagcgtcggtgaagttgtcatgcactggatcgggcttcaacatcgaggattactacatccactgggtcaagcaacgcaccgagcaggggctggaatggatcggacggatcgaccccgaaaacgatgaaaccaagtacgggcctatcttccaaggacgggccaccattacggctgacacgtcaagcaataccgtctacctccagctttccagcctgacctccgaggacactgccgtgtactactgcgccttcagaggaggcgtgtactggggaccaggaaccactttgaccgtgtccagcggaggcggtggatcaggaggaggaggctcaggcggtggcggctcgcacatggacgtggtcatgactcagtccccgctgaccctgtcggtggcaattggacagagcgcatccatctcgtgcaagagctcacagtcgctgctggattccgacggaaagacttatctgaactggctgctccaaagaccagggcaatcaccgaaacgccttatctccctggtgtcgaaactcgactcgggtgtgccggatcggtttaccggtagcgggtccggcacggacttcactctccgcatttcgagggtggaagcggaggatctcgggatctactactgttggcagggaacccacttccctgggacttttggaggcggaactaagctggaaatcaagaccactaccccagcaccgaggccacccaccccggctcctaccatcgcctcccagcctctgtccctgcgtccggaggcatgtagacccgcagctggtggggccgtgcatacccggggtcttgacttcgcctgcgatatctacatttgggcccctctggctggtacttgcggggtcctgctgctttcactcgtgatcactctttactgtaagcgcggtcggaagaagctgctgtacatctttaagcaacccttcatgaggcctgtgcagactactcaagaggaggacggctgttcatgccggttcccagaggaggaggaaggcggctgcgaactgcgcgtgaaattcagccgcagcgcagatgctccagcctacaagcaggggcagaaccagctctacaacgaactcaatcttggtcggagagaggagtacgacgtgctggacaagcggagaggacgggacccagaaatgggcgggaagccgcgcagaaagaatccccaagagggcctgtacaacgagctccaaaaggataagatggcagaagcctatagcgagattggtatgaaaggggaacgcagaagaggcaaaggccacgacggactgtaccagggactcagcaccgccaccaaggacacctatgacgctcttcacatgcaggccctgccgcctcgg

SEQ ID NO: 1411 - protein, 487 aa, Artificial Sequence
  source: /note="Description of Artificial Sequence: Synthetic polypeptide"
MALPVTALLLPLALLLHAARPEIQLQQSGAELVKPGASVKLSCTGSGFNIEDYYIHWVKQRTEQGLEWIGRIDPENDETKYGPIFQGRATITADTSSNTVYLQLSSLTSEDTAVYYCAFRGGVYWGPGTTLTVSSGGGGSGGGGSGGGGSHMDVVMTQSPLTLSVAIGQSASISCKSSQSLLDSDGKTYLNWLLQRPGQSPKRLISLVSKLDSGVPDRFTGSGSGTDFTLRISRVEAEDLGIYYCWQGTHFPGTFGGGTKLEIKTTTPAPRPPTPAPTIASQPLSLRPEACRPAAGGAVHTRGLDFACDIYIWAPLAGTCGVLLLSLVITLYCKRGRKKLLYIFKQPFMRPVQTTQEEDGCSCRFPEEEEGGCELRVKFSRSADAPAYKQGQNQLYNELNLGRREEYDVLDKRRGRDPEMGGKPRRKNPQEGLYNELQKDKMAEAYSEIGMKGERRRGKGHDGLYQGLSTATKDTYDALHMQALPPR

SEQ ID NO: 1412 - protein, 240 aa, Artificial Sequence
  source: /note="Description of Artificial Sequence: Synthetic polypeptide"
DIQMTQSPSSLSASVGDRVTITCRASQGIRNNLAWYQQKPGKAPKRLIYAASNLQSGVPSRFTGSGSGTEFTLIVSSLQPEDFATYYCLQHHSYPLTSGGGTKVEIKRTGSTSGSGKPGSGEGSEVQVLESGGGLVQPGGSLRLSCAASGFTFSSYAMSWVRQAPGKGLEWVSAISGSGGSTNYADSVKGRFTISRDNSKNTLYLQMNSLRAEDTAVYYCAGSSGWSEYWGQGTLVTVSS

SEQ ID NO: 1413 - DNA, 720 bp, Artificial Sequence
  source: /note="Description of Artificial Sequence: Synthetic polynucleotide"
gatatccaaatgactcagagcccttcatccctgagcgccagcgtcggagacagggtgaccatcacgtgccgggcatcccaaggcattagaaataacttggcgtggtatcagcaaaaaccaggaaaggccccgaagcgcctgatctacgcggcctccaaccttcagtcaggagtgccctcgcgcttcaccgggagcggtagcggaactgagtttacccttatcgtgtcgtccctgcagccagaggacttcgcgacctactactgcctccagcatcactcgtacccgttgacttcgggaggcggaaccaaggtcgaaatcaaacgcactggctcgacgtcagggtccggtaaaccgggatcgggagaaggatcggaagtccaagtgctggagagcggaggcggactcgtgcaacctggcgggtcgctgcggctcagctgtgccgcgtcgggttttactttcagctcgtacgctatgtcatgggtgcggcaggctccgggaaaggggctggaatgggtgtccgctatttccggctcgggtggaagcaccaattacgccgactccgtgaagggacgcttcaccatctcacgggataactccaagaatactctgtacctccagatgaactcgctgagagccgaggacaccgcagtgtactactgcgcagggtcaagcggctggtccgaatactggggacagggcaccctcgtcactgtcagctcc

SEQ ID NO: 1414 - DNA, 807 bp, Artificial Sequence
  source: /note="Description of Artificial Sequence: Synthetic polynucleotide"
atggccctccctgtcaccgccctgctgcttccgctggctcttctgctccacgccgctcggcccgatatccaaatgactcagagcccttcatccctgagcgccagcgtcggagacagggtgaccatcacgtgccgggcatcccaaggcattagaaataacttggcgtggtatcagcaaaaaccaggaaaggccccgaagcgcctgatctacgcggcctccaaccttcagtcaggagtgccctcgcgcttcaccgggagcggtagcggaactgagtttacccttatcgtgtcgtccctgcagccagaggacttcgcgacctactactgcctccagcatcactcgtacccgttgacttcgggaggcggaaccaaggtcgaaatcaaacgcactggctcgacgtcagggtccggtaaaccgggatcgggagaaggatcggaagtccaagtgctggagagcggaggcggactcgtgcaacctggcgggtcgctgcggctcagctgtgccgcgtcgggttttactttcagctcgtacgctatgtcatgggtgcggcaggctccgggaaaggggctggaatgggtgtccgctatttccggctcgggtggaagcaccaattacgccgactccgtgaagggacgcttcaccatctcacgggataactccaagaatactctgtacctccagatgaactcgctgagagccgaggacaccgcagtgtactactgcgcagggtcaagcggctggtccgaatactggggacagggcaccctcgtcactgtcagctcccatcaccatcaccaccaccatcac

SEQ ID NO: 1415 - protein, 269 aa, Artificial Sequence
  source: /note="Description of Artificial Sequence: Synthetic polypeptide"
MALPVTALLLPLALLLHAARPDIQMTQSPSSLSASVGDRVTITCRASQGIRNNLAWYQQKPGKAPKRLIYAASNLQSGVPSRFTGSGSGTEFTLIVSSLQPEDFATYYCLQHHSYPLTSGGGTKVEIKRTGSTSGSGKPGSGEGSEVQVLESGGGLVQPGGSLRLSCAASGFTFSSYAMSWVRQAPGKGLEWVSAISGSGGSTNYADSVKGRFTISRDNSKNTLYLQMNSLRAEDTAVYYCAGSSGWSEYWGQGTLVTVSSHHHHHHHH

SEQ ID NO: 1416 - DNA, 1452 bp, Artificial Sequence
  source: /note="Description of Artificial Sequence: Synthetic polynucleotide"
atggccctccctgtcaccgccctgctgcttccgctggctcttctgctccacgccgctcggcccgatatccaaatgactcagagcccttcatccctgagcgccagcgtcggagacagggtgaccatcacgtgccgggcatcccaaggcattagaaataacttggcgtggtatcagcaaaaaccaggaaaggccccgaagcgcctgatctacgcggcctccaaccttcagtcaggagtgccctcgcgcttcaccgggagcggtagcggaactgagtttacccttatcgtgtcgtccctgcagccagaggacttcgcgacctactactgcctccagcatcactcgtacccgttgacttcgggaggcggaaccaaggtcgaaatcaaacgcactggctcgacgtcagggtccggtaaaccgggatcgggagaaggatcggaagtccaagtgctggagagcggaggcggactcgtgcaacctggcgggtcgctgcggctcagctgtgccgcgtcgggttttactttcagctcgtacgctatgtcatgggtgcggcaggctccgggaaaggggctggaatgggtgtccgctatttccggctcgggtggaagcaccaattacgccgactccgtgaagggacgcttcaccatctcacgggataactccaagaatactctgtacctccagatgaactcgctgagagccgaggacaccgcagtgtactactgcgcagggtcaagcggctggtccgaatactggggacagggcaccctcgtcactgtcagctccaccactaccccagcaccgaggccacccaccccggctcctaccatcgcctcccagcctctgtccctgcgtccggaggcatgtagacccgcagctggtggggccgtgcatacccggggtcttgacttcgcctgcgatatctacatttgggcccctctggctggtacttgcggggtcctgctgctttcactcgtgatcactctttactgtaagcgcggtcggaagaagctgctgtacatctttaagcaacccttcatgaggcctgtgcagactactcaagaggaggacggctgttcatgccggttcccagaggaggaggaaggcggctgcgaactgcgcgtgaaattcagccgcagcgcagatgctccagcctacaagcaggggcagaaccagctctacaacgaactcaatcttggtcggagagaggagtacgacgtgctggacaagcggagaggacgggacccagaaatgggcgggaagccgcgcagaaagaatccccaagagggcctgtacaacgagctccaaaaggataagatggcagaagcctatagcgagattggtatgaaaggggaacgcagaagaggcaaaggccacgacggactgtaccagggactcagcaccgccaccaaggacacctatgacgctcttcacatgcaggccctgccgcctcgg

SEQ ID NO: 1417 - protein, 484 aa, Artificial Sequence
  source: /note="Description of Artificial Sequence: Synthetic polypeptide"
MALPVTALLLPLALLLHAARPDIQMTQSPSSLSASVGDRVTITCRASQGIRNNLAWYQQKPGKAPKRLIYAASNLQSGVPSRFTGSGSGTEFTLIVSSLQPEDFATYYCLQHHSYPLTSGGGTKVEIKRTGSTSGSGKPGSGEGSEVQVLESGGGLVQPGGSLRLSCAASGFTFSSYAMSWVRQAPGKGLEWVSAISGSGGSTNYADSVKGRFTISRDNSKNTLYLQMNSLRAEDTAVYYCAGSSGWSEYWGQGTLVTVSSTTTPAPRPPTPAPTIASQPLSLRPEACRPAAGGAVHTRGLDFACDIYIWAPLAGTCGVLLLSLVITLYCKRGRKKLLYIFKQPFMRPVQTTQEEDGCSCRFPEEEEGGCELRVKFSRSADAPAYKQGQNQLYNELNLGRREEYDVLDKRRGRDPEMGGKPRRKNPQEGLYNELQKDKMAEAYSEIGMKGERRRGKGHDGLYQGLSTATKDTYDALHMQALPPR

SEQ ID NO: 1418 - protein, 244 aa, Artificial Sequence
  source: /note="Description of Artificial Sequence: Synthetic polypeptide"
QVQLQQSGAEVKKPGASVKVSCKASGYTFTGYYMHWVRQAPGQGLEWMGRINPNSGGTNYAQKFQGRVTMTRDTSISTAYMELSRLRSEDTAVYYCARGRYYGMDVWGQGTMVTVSSGGGGSGGGGSGGGGSGGGGSEIVLTQSPATLSLSPGERATISCRASQSVSSNFAWYQQRPGQAPRLLIYDASNRATGIPPRFSGSGSGTDFTLTISSLEPEDFAAYYCHQRSNWLYTFGQGTKVDIK

SEQ ID NO: 1419 - protein, 488 aa, Artificial Sequence
  source: /note="Description of Artificial Sequence: Synthetic polypeptide"
MALPVTALLLPLALLLHAARPQVQLQQSGAEVKKPGASVKVSCKASGYTFTGYYMHWVRQAPGQGLEWMGRINPNSGGTNYAQKFQGRVTMTRDTSISTAYMELSRLRSEDTAVYYCARGRYYGMDVWGQGTMVTVSSGGGGSGGGGSGGGGSGGGGSEIVLTQSPATLSLSPGERATISCRASQSVSSNFAWYQQRPGQAPRLLIYDASNRATGIPPRFSGSGSGTDFTLTISSLEPEDFAAYYCHQRSNWLYTFGQGTKVDIKTTTPAPRPPTPAPTIASQPLSLRPEACRPAAGGAVHTRGLDFACDIYIWAPLAGTCGVLLLSLVITLYCKRGRKKLLYIFKQPFMRPVQTTQEEDGCSCRFPEEEEGGCELRVKFSRSADAPAYKQGQNQLYNELNLGRREEYDVLDKRRGRDPEMGGKPRRKNPQEGLYNELQKDKMAEAYSEIGMKGERRRGKGHDGLYQGLSTATKDTYDALHMQALPPR

SEQ ID NO: 1420 - protein, 253 aa, Artificial Sequence
  source: /note="Description of Artificial Sequence: Synthetic polypeptide"
QVQLVQSGAEVKKPGASVKVSCKASGYTFTGYYMHWVRQAPGQGLEWMGWINPNSGGTNYAQKFQGRVTMTRDTSISTAYMELSRLRSDDTAVYYCARDLRRTVVTPRAYYGMDVWGQGTTVTVSSGGGGSGGGGSGGGGSGGGGSDIQLTQSPSTLSASVGDRVTITCQASQDISNSLNWYQQKAGKAPKLLIYDASTLETGVPSRFSGSGSGTDFSFTISSLQPEDIATYYCQQHDNLPLTFGQGTKVEIK

SEQ ID NO: 1421 - protein, 497 aa, Artificial Sequence
  source: /note="Description of Artificial Sequence: Synthetic polypeptide"
MALPVTALLLPLALLLHAARPQVQLVQSGAEVKKPGASVKVSCKASGYTFTGYYMHWVRQAPGQGLEWMGWINPNSGGTNYAQKFQGRVTMTRDTSISTAYMELSRLRSDDTAVYYCARDLRRTVVTPRAYYGMDVWGQGTTVTVSSGGGGSGGGGSGGGGSGGGGSDIQLTQSPSTLSASVGDRVTITCQASQDISNSLNWYQQKAGKAPKLLIYDASTLETGVPSRFSGSGSGTDFSFTISSLQPEDIATYYCQQHDNLPLTFGQGTKVEIKTTTPAPRPPTPAPTIASQPLSLRPEACRPAAGGAVHTRGLDFACDIYIWAPLAGTCGVLLLSLVITLYCKRGRKKLLYIFKQPFMRPVQTTQEEDGCSCRFPEEEEGGCELRVKFSRSADAPAYKQGQNQLYNELNLGRREEYDVLDKRRGRDPEMGGKPRRKNPQEGLYNELQKDKMAEAYSEIGMKGERRRGKGHDGLYQGLSTATKDTYDALHMQALPPR

SEQ ID NO: 1422 - protein, 246 aa, Artificial Sequence
  source: /note="Description of Artificial Sequence: Synthetic polypeptide"
QVQLVQSGAEVKKPGAPVKVSCKASGYTFTGYYMHWVRQAPGQGLEWMGWINPNSGGTNYAQKFQGRVTMTRDTSISTAYMELSRLRSDDTAVYYCARGEWDGSYYYDYWGQGTLVTVSSGGGGSGGGGSGGGGSGGGGSDIVLTQTPSSLSASVGDRVTITCRASQSINTYLNWYQHKPGKAPKLLIYAASSLQSGVPSRFSGSGSGTDFTLTISSLQPEDFATYYCQQSFSPLTFGGGTKLEIK

SEQ ID NO: 1423 - protein, 490 aa, Artificial Sequence
  source: /note="Description of Artificial Sequence: Synthetic polypeptide"
MALPVTALLLPLALLLHAARPQVQLVQSGAEVKKPGAPVKVSCKASGYTFTGYYMHWVRQAPGQGLEWMGWINPNSGGTNYAQKFQGRVTMTRDTSISTAYMELSRLRSDDTAVYYCARGEWDGSYYYDYWGQGTLVTVSSGGGGSGGGGSGGGGSGGGGSDIVLTQTPSSLSASVGDRVTITCRASQSINTYLNWYQHKPGKAPKLLIYAASSLQSGVPSRFSGSGSGTDFTLTISSLQPEDFATYYCQQSFSPLTFGGGTKLEIKTTTPAPRPPTPAPTIASQPLSLRPEACRPAAGGAVHTRGLDFACDIYIWAPLAGTCGVLLLSLVITLYCKRGRKKLLYIFKQPFMRPVQTTQEEDGCSCRFPEEEEGGCELRVKFSRSADAPAYKQGQNQLYNELNLGRREEYDVLDKRRGRDPEMGGKPRRKNPQEGLYNELQKDKMAEAYSEIGMKGERRRGKGHDGLYQGLSTATKDTYDALHMQALPPR

SEQ ID NO: 1424 - protein, 242 aa, Artificial Sequence
  source: /note="Description of Artificial Sequence: Synthetic polypeptide"
QVQLVESGGGLVQPGGSLRLSCAASGFTFSSYWMHWVRQVPGKGLVWVSRINTDGSTTTYADSVEGRFTISRDNAKNTLYLQMNSLRDDDTAVYYCVGGHWAVWGQGTTVTVSSGGGGSGGGGSGGGGSGGGGSDIQMTQSPSTLSASVGDRVTITCRASQSISDRLAWYQQKPGKAPKLLIYKASSLESGVPSRFSGSGSGTEFTLTISSLQPDDFAVYYCQQYGHLPMYTFGQGTKVEIK

SEQ ID NO: 1425 - protein, 486 aa, Artificial Sequence
  source: /note="Description of Artificial Sequence: Synthetic polypeptide"
MALPVTALLLPLALLLHAARPQVQLVESGGGLVQPGGSLRLSCAASGFTFSSYWMHWVRQVPGKGLVWVSRINTDGSTTTYADSVEGRFTISRDNAKNTLYLQMNSLRDDDTAVYYCVGGHWAVWGQGTTVTVSSGGGGSGGGGSGGGGSGGGGSDIQMTQSPSTLSASVGDRVTITCRASQSISDRLAWYQQKPGKAPKLLIYKASSLESGVPSRFSGSGSGTEFTLTISSLQPDDFAVYYCQQYGHLPMYTFGQGTKVEIKTTTPAPRPPTPAPTIASQPLSLRPEACRPAAGGAVHTRGLDFACDIYIWAPLAGTCGVLLLSLVITLYCKRGRKKLLYIFKQPFMRPVQTTQEEDGCSCRFPEEEEGGCELRVKFSRSADAPAYKQGQNQLYNELNLGRREEYDVLDKRRGRDPEMGGKPRRKNPQEGLYNELQKDKMAEAYSEIGMKGERRRGKGHDGLYQGLSTATKDTYDALHMQALPPR

SEQ ID NO: 1426 - protein, 241 aa, Artificial Sequence
  source: /note="Description of Artificial Sequence: Synthetic polypeptide"
QVQLVQSGAEVEKPGASVKVSCKASGYTFTDYYMHWVRQAPGQGLEWMGWINPNSGGTNYAQKFQGRVTMTRDTSISTAYMELSRLRSDDTAVYYCASGWDFDYWGQGTLVTVSSGGGGSGGGGSGGGGSGGGGSDIVMTQSPSSLSASVGDRVTITCRASQSIRYYLSWYQQKPGKAPKLLIYTASILQNGVPSRFSGSGSGTDFTLTISSLQPEDFATYYCLQTYTTPDFGPGTKVEIK

SEQ ID NO: 1427 - protein, 485 aa, Artificial Sequence
  source: /note="Description of Artificial Sequence: Synthetic polypeptide"
MALPVTALLLPLALLLHAARPQVQLVQSGAEVEKPGASVKVSCKASGYTFTDYYMHWVRQAPGQGLEWMGWINPNSGGTNYAQKFQGRVTMTRDTSISTAYMELSRLRSDDTAVYYCASGWDFDYWGQGTLVTVSSGGGGSGGGGSGGGGSGGGGSDIVMTQSPSSLSASVGDRVTITCRASQSIRYYLSWYQQKPGKAPKLLIYTASILQNGVPSRFSGSGSGTDFTLTISSLQPEDFATYYCLQTYTTPDFGPGTKVEIKTTTPAPRPPTPAPTIASQPLSLRPEACRPAAGGAVHTRGLDFACDIYIWAPLAGTCGVLLLSLVITLYCKRGRKKLLYIFKQPFMRPVQTTQEEDGCSCRFPEEEEGGCELRVKFSRSADAPAYKQGQNQLYNELNLGRREEYDVLDKRRGRDPEMGGKPRRKNPQEGLYNELQKDKMAEAYSEIGMKGERRRGKGHDGLYQGLSTATKDTYDALHMQALPPR

SEQ ID NO: 1428 - protein, 253 aa, Artificial Sequence
  source: /note="Description of Artificial Sequence: Synthetic polypeptide"
QVQLVQSGAEVKKPGASVKVSCKASGYTFTSYYMHWVRQAPGQGLEWMGIINPSGGSTSYAQKFQGRVTMTRDTSTSTVYMELSSLRSEDTAVYYCARYRLIAVAGDYYYYGMDVWGQGTMVTVSSGGGGSGGGGSGGGGSGGGGSDIQMTQSPSSVSASVGDRVTITCRASQGVGRWLAWYQQKPGTAPKLLIYAASTLQSGVPSRFSGSGSGTDFTLTINNLQPEDFATYYCQQANSFPLTFGGGTRLEIK

SEQ ID NO: 1429 - protein, 497 aa, Artificial Sequence
  source: /note="Description of Artificial Sequence: Synthetic polypeptide"
MALPVTALLLPLALLLHAARPQVQLVQSGAEVKKPGASVKVSCKASGYTFTSYYMHWVRQAPGQGLEWMGIINPSGGSTSYAQKFQGRVTMTRDTSTSTVYMELSSLRSEDTAVYYCARYRLIAVAGDYYYYGMDVWGQGTMVTVSSGGGGSGGGGSGGGGSGGGGSDIQMTQSPSSVSASVGDRVTITCRASQGVGRWLAWYQQKPGTAPKLLIYAASTLQSGVPSRFSGSGSGTDFTLTINNLQPEDFATYYCQQANSFPLTFGGGTRLEIKTTTPAPRPPTPAPTIASQPLSLRPEACRPAAGGAVHTRGLDFACDIYIWAPLAGTCGVLLLSLVITLYCKRGRKKLLYIFKQPFMRPVQTTQEEDGCSCRFPEEEEGGCELRVKFSRSADAPAYKQGQNQLYNELNLGRREEYDVLDKRRGRDPEMGGKPRRKNPQEGLYNELQKDKMAEAYSEIGMKGERRRGKGHDGLYQGLSTATKDTYDALHMQALPPR

SEQ ID NO: 1430 - protein, 250 aa, Artificial Sequence
  source: /note="Description of Artificial Sequence: Synthetic polypeptide"
QVQLVQSGGGVVQPGRSLRLSCAASGFTFSSYAMHWVRQAPGKGLEWVAVISYDGSNKYYADSVKGRFTISRDNSKNTLYLQMNSLRAEDTAVYYCARWKVSSSSPAFDYWGQGTLVTVSSGGGGSGGGGSGGGGSGGGGSEIVLTQSPATLSLSPGERAILSCRASQSVYTKYLGWYQQKPGQAPRLLIYDASTRATGIPDRFSGSGSGTDFTLTINRLEPEDFAVYYCQHYGGSPLITFGQGTRLEIK

SEQ ID NO: 1431 - protein, 494 aa, Artificial Sequence
  source: /note="Description of Artificial Sequence: Synthetic polypeptide"
MALPVTALLLPLALLLHAARPQVQLVQSGGGVVQPGRSLRLSCAASGFTFSSYAMHWVRQAPGKGLEWVAVISYDGSNKYYADSVKGRFTISRDNSKNTLYLQMNSLRAEDTAVYYCARWKVSSSSPAFDYWGQGTLVTVSSGGGGSGGGGSGGGGSGGGGSEIVLTQSPATLSLSPGERAILSCRASQSVYTKYLGWYQQKPGQAPRLLIYDASTRATGIPDRFSGSGSGTDFTLTINRLEPEDFAVYYCQHYGGSPLITFGQGTRLEIKTTTPAPRPPTPAPTIASQPLSLRPEACRPAAGGAVHTRGLDFACDIYIWAPLAGTCGVLLLSLVITLYCKRGRKKLLYIFKQPFMRPVQTTQEEDGCSCRFPEEEEGGCELRVKFSRSADAPAYKQGQNQLYNELNLGRREEYDVLDKRRGRDPEMGGKPRRKNPQEGLYNELQKDKMAEAYSEIGMKGERRRGKGHDGLYQGLSTATKDTYDALHMQALPPR

SEQ ID NO: 1432 - protein, 246 aa, Artificial Sequence
  source: /note="Description of Artificial Sequence: Synthetic polypeptide"
QVQLQQSGAEVKKPGASVKVSCKTSGYPFTGYSLHWVRQAPGQGLEWMGWINPNSGGTNYAQKFQGRVTMTRDTSISTAYMELSRLRSDDTAVYYCARDHYGGNSLFYWGQGTLVTVSSGGGGSGGGGSGGGGSGGGGSDIQLTQSPSSISASVGDTVSITCRASQDSGTWLAWYQQKPGKAPNLLMYDASTLEDGVPSRFSGSASGTEFTLTVNRLQPEDSATYYCQQYNSYPLTFGGGTKVDIK

SEQ ID NO: 1433 - protein, 490 aa, Artificial Sequence
  source: /note="Description of Artificial Sequence: Synthetic polypeptide"
MALPVTALLLPLALLLHAARPQVQLQQSGAEVKKPGASVKVSCKTSGYPFTGYSLHWVRQAPGQGLEWMGWINPNSGGTNYAQKFQGRVTMTRDTSISTAYMELSRLRSDDTAVYYCARDHYGGNSLFYWGQGTLVTVSSGGGGSGGGGSGGGGSGGGGSDIQLTQSPSSISASVGDTVSITCRASQDSGTWLAWYQQKPGKAPNLLMYDASTLEDGVPSRFSGSASGTEFTLTVNRLQPEDSATYYCQQYNSYPLTFGGGTKVDIKTTTPAPRPPTPAPTIASQPLSLRPEACRPAAGGAVHTRGLDFACDIYIWAPLAGTCGVLLLSLVITLYCKRGRKKLLYIFKQPFMRPVQTTQEEDGCSCRFPEEEEGGCELRVKFSRSADAPAYKQGQNQLYNELNLGRREEYDVLDKRRGRDPEMGGKPRRKNPQEGLYNELQKDKMAEAYSEIGMKGERRRGKGHDGLYQGLSTATKDTYDALHMQALPPR

SEQ ID NO: 1434 - protein, 248 aa, Artificial Sequence
  source: /note="Description of Artificial Sequence: Synthetic polypeptide"
QVQLVQSGAEVKKPGASVEVSCKASGYTFTSYYMHWVRQAPGQGLEWMGIINPSGGSTGYAQKFQGRVTMTRDTSTSTVHMELSSLRSEDTAVYYCARGGYSSSSDAFDIWGQGTMVTVSSGGGGSGGGGSGGGGSGGGGSDIQMTQSPPSLSASVGDRVTITCRASQDISSALAWYQQKPGTPPKLLIYDASSLESGVPSRFSGSGSGTDFTLTISSLQPEDFATYYCQQFSSYPLTFGGGTRLEIK

SEQ ID NO: 1435 - protein, 492 aa, Artificial Sequence
  source: /note="Description of Artificial Sequence: Synthetic polypeptide"
MALPVTALLLPLALLLHAARPQVQLVQSGAEVKKPGASVEVSCKASGYTFTSYYMHWVRQAPGQGLEWMGIINPSGGSTGYAQKFQGRVTMTRDTSTSTVHMELSSLRSEDTAVYYCARGGYSSSSDAFDIWGQGTMVTVSSGGGGSGGGGSGGGGSGGGGSDIQMTQSPPSLSASVGDRVTITCRASQDISSALAWYQQKPGTPPKLLIYDASSLESGVPSRFSGSGSGTDFTLTISSLQPEDFATYYCQQFSSYPLTFGGGTRLEIKTTTPAPRPPTPAPTIASQPLSLRPEACRPAAGGAVHTRGLDFACDIYIWAPLAGTCGVLLLSLVITLYCKRGRKKLLYIFKQPFMRPVQTTQEEDGCSCRFPEEEEGGCELRVKFSRSADAPAYKQGQNQLYNELNLGRREEYDVLDKRRGRDPEMGGKPRRKNPQEGLYNELQKDKMAEAYSEIGMKGERRRGKGHDGLYQGLSTATKDTYDALHMQALPPR

SEQ ID NO: 1436 - protein, 255 aa, Artificial Sequence
  source: /note="Description of Artificial Sequence: Synthetic polypeptide"
QVQLVQSGAEVKKPGASVKVSCKASGYTFTSYGISWVRQAPGQGLEWMGWISAYNGNTNYAQKLQGRVTMTTDTSTSTAYMELRSLRSDDTAVYYCARVAGGIYYYYGMDVWGQGTTITVSSGGGGSGGGGSGGGGSGGGGSDIVMTQTPDSLAVSLGERATISCKSSHSVLYNRNNKNYLAWYQQKPGQPPKLLFYWASTRKSGVPDRFSGSGSGTDFTLTISSLQPEDFATYFCQQTQTFPLTFGQGTRLEIN

SEQ ID NO: 1437 - protein, 499 aa, Artificial Sequence
  source: /note="Description of Artificial Sequence: Synthetic polypeptide"
MALPVTALLLPLALLLHAARPQVQLVQSGAEVKKPGASVKVSCKASGYTFTSYGISWVRQAPGQGLEWMGWISAYNGNTNYAQKLQGRVTMTTDTSTSTAYMELRSLRSDDTAVYYCARVAGGIYYYYGMDVWGQGTTITVSSGGGGSGGGGSGGGGSGGGGSDIVMTQTPDSLAVSLGERATISCKSSHSVLYNRNNKNYLAWYQQKPGQPPKLLFYWASTRKSGVPDRFSGSGSGTDFTLTISSLQPEDFATYFCQQTQTFPLTFGQGTRLEINTTTPAPRPPTPAPTIASQPLSLRPEACRPAAGGAVHTRGLDFACDIYIWAPLAGTCGVLLLSLVITLYCKRGRKKLLYIFKQPFMRPVQTTQEEDGCSCRFPEEEEGGCELRVKFSRSADAPAYKQGQNQLYNELNLGRREEYDVLDKRRGRDPEMGGKPRRKNPQEGLYNELQKDKMAEAYSEIGMKGERRRGKGHDGLYQGLSTATKDTYDALHMQALPPR

SEQ ID NO: 1438 - protein, 241 aa, Artificial Sequence
  source: /note="Description of Artificial Sequence: Synthetic polypeptide"
QVQLQQSGAEVKKPGASVKVSCKASGYTFTGYYMHWVRQAPGQGLEWMGWINPNSGGTNYAQNFQGRVTMTRDTSISTAYMELRRLRSDDTAVYYCASGWDFDYWGQGTLVTVSSGGGGSGGGGSGGGGSGGGGSDIRMTQSPSSLSASVGDRVTITCRASQSIRYYLSWYQQKPGKAPKLLIYTASILQNGVPSRFSGSGSGTDFTLTISSLQPEDFATYYCLQTYTTPDFGPGTKVEIK

SEQ ID NO: 1439 - protein, 485 aa, Artificial Sequence
  source: /note="Description of Artificial Sequence: Synthetic polypeptide"
MALPVTALLLPLALLLHAARPQVQLQQSGAEVKKPGASVKVSCKASGYTFTGYYMHWVRQAPGQGLEWMGWINPNSGGTNYAQNFQGRVTMTRDTSISTAYMELRRLRSDDTAVYYCASGWDFDYWGQGTLVTVSSGGGGSGGGGSGGGGSGGGGSDIRMTQSPSSLSASVGDRVTITCRASQSIRYYLSWYQQKPGKAPKLLIYTASILQNGVPSRFSGSGSGTDFTLTISSLQPEDFATYYCLQTYTTPDFGPGTKVEIKTTTPAPRPPTPAPTIASQPLSLRPEACRPAAGGAVHTRGLDFACDIYIWAPLAGTCGVLLLSLVITLYCKRGRKKLLYIFKQPFMRPVQTTQEEDGCSCRFPEEEEGGCELRVKFSRSADAPAYKQGQNQLYNELNLGRREEYDVLDKRRGRDPEMGGKPRRKNPQEGLYNELQKDKMAEAYSEIGMKGERRRGKGHDGLYQGLSTATKDTYDALHMQALPPR

SEQ ID NO: 1440 - protein, 246 aa, Artificial Sequence
  source: /note="Description of Artificial Sequence: Synthetic polypeptide"
QVQLVQSGAEVKKPGASVKVSCKASGYTFTGYYMHWVRQAPGQGLEWMGRINPNSGGTNYAQKFQGRVTMTTDTSTSTAYMELRSLRSDDTAVYYCARTTTSYAFDIWGQGTMVTVSSGGGGSGGGGSGGGGSGGGGSDIQLTQSPSTLSASVGDRVTITCRASQSISTWLAWYQQKPGKAPNLLIYKASTLESGVPSRFSGSGSGTEFTLTISSLQPDDFATYYCQQYNTYSPYTFGQGTKLEIK

SEQ ID NO: 1441 - protein, 490 aa, Artificial Sequence
  source: /note="Description of Artificial Sequence: Synthetic polypeptide"
MALPVTALLLPLALLLHAARPQVQLVQSGAEVKKPGASVKVSCKASGYTFTGYYMHWVRQAPGQGLEWMGRINPNSGGTNYAQKFQGRVTMTTDTSTSTAYMELRSLRSDDTAVYYCARTTTSYAFDIWGQGTMVTVSSGGGGSGGGGSGGGGSGGGGSDIQLTQSPSTLSASVGDRVTITCRASQSISTWLAWYQQKPGKAPNLLIYKASTLESGVPSRFSGSGSGTEFTLTISSLQPDDFATYYCQQYNTYSPYTFGQGTKLEIKTTTPAPRPPTPAPTIASQPLSLRPEACRPAAGGAVHTRGLDFACDIYIWAPLAGTCGVLLLSLVITLYCKRGRKKLLYIFKQPFMRPVQTTQEEDGCSCRFPEEEEGGCELRVKFSRSADAPAYKQGQNQLYNELNLGRREEYDVLDKRRGRDPEMGGKPRRKNPQEGLYNELQKDKMAEAYSEIGMKGERRRGKGHDGLYQGLSTATKDTYDALHMQALPPR

SEQ ID NO: 1442 - protein, 249 aa, Artificial Sequence
  source: /note="Description of Artificial Sequence: Synthetic polypeptide"
QVQLVQSGGGLVKPGGSLRLSCEASGFIFSDYYMGWIRQAPGKGLEWVSYIGRSGSSMYYADSVKGRFTFSRDNAKNSLYLQMNSLRAEDTAVYYCAASPVVAATEDFQHWGQGTLVTVSSGGGGSGGGGSGGGGSGGGGSDIVMTQTPATLSLSPGERATLSCRASQSVTSNYLAWYQQKPGQAPRLLLFGASTRATGIPDRFSGSGSGTDFTLTINRLEPEDFAMYYCQQYGSAPVTFGQGTKLEIK

SEQ ID NO: 1443 - protein, 493 aa, Artificial Sequence
  source: /note="Description of Artificial Sequence: Synthetic polypeptide"
MALPVTALLLPLALLLHAARPQVQLVQSGGGLVKPGGSLRLSCEASGFIFSDYYMGWIRQAPGKGLEWVSYIGRSGSSMYYADSVKGRFTFSRDNAKNSLYLQMNSLRAEDTAVYYCAASPVVAATEDFQHWGQGTLVTVSSGGGGSGGGGSGGGGSGGGGSDIVMTQTPATLSLSPGERATLSCRASQSVTSNYLAWYQQKPGQAPRLLLFGASTRATGIPDRFSGSGSGTDFTLTINRLEPEDFAMYYCQQYGSAPVTFGQGTKLEIKTTTPAPRPPTPAPTIASQPLSLRPEACRPAAGGAVHTRGLDFACDIYIWAPLAGTCGVLLLSLVITLYCKRGRKKLLYIFKQPFMRPVQTTQEEDGCSCRFPEEEEGGCELRVKFSRSADAPAYKQGQNQLYNELNLGRREEYDVLDKRRGRDPEMGGKPRRKNPQEGLYNELQKDKMAEAYSEIGMKGERRRGKGHDGLYQGLSTATKDTYDALHMQALPPR

SEQ ID NO: 1444 - protein, 249 aa, Artificial Sequence
  source: /note="Description of Artificial Sequence: Synthetic polypeptide"
QVQLVQSGAEVRAPGASVKISCKASGFTFRGYYIHWVRQAPGQGLEWMGIINPSGGSRAYAQKFQGRVTMTRDTSTSTVYMELSSLRSDDTAMYYCARTASCGGDCYYLDYWGQGTLVTVSSGGGGSGGGGSGGGGSGGGGSDIQMTQSPPTLSASVGDRVTITCRASENVNIWLAWYQQKPGKAPKLLIYKSSSLASGVPSRFSGSGSGAEFTLTISSLQPDDFATYYCQQYQSYPLTFGGGTKVDIK

SEQ ID NO: 1445 - protein, 493 aa, Artificial Sequence
  source: /note="Description of Artificial Sequence: Synthetic polypeptide"
MALPVTALLLPLALLLHAARPQVQLVQSGAEVRAPGASVKISCKASGFTFRGYYIHWVRQAPGQGLEWMGIINPSGGSRAYAQKFQGRVTMTRDTSTSTVYMELSSLRSDDTAMYYCARTASCGGDCYYLDYWGQGTLVTVSSGGGGSGGGGSGGGGSGGGGSDIQMTQSPPTLSASVGDRVTITCRASENVNIWLAWYQQKPGKAPKLLIYKSSSLASGVPSRFSGSGSGAEFTLTISSLQPDDFATYYCQQYQSYPLTFGGGTKVDIKTTTPAPRPPTPAPTIASQPLSLRPEACRPAAGGAVHTRGLDFACDIYIWAPLAGTCGVLLLSLVITLYCKRGRKKLLYIFKQPFMRPVQTTQEEDGCSCRFPEEEEGGCELRVKFSRSADAPAYKQGQNQLYNELNLGRREEYDVLDKRRGRDPEMGGKPRRKNPQEGLYNELQKDKMAEAYSEIGMKGERRRGKGHDGLYQGLSTATKDTYDALHMQALPPR

SEQ ID NO: 1446 - protein, 244 aa, Artificial Sequence
  source: /note="Description of Artificial Sequence: Synthetic polypeptide"
QVQLVQSGGGLVQPGRSLRLSCAASGFTFDDYAMHWVRQAPGKGLEWVSGISWNSGSIGYADSVKGRFTISRDNAKNSLYLQMNSLRAEDTAVYYCAKDGSSSWSWGYFDYWGQGTLVTVSSGGGGSGGGGSGGGGSSSELTQDPAVSVALGQTVRTTCQGDALRSYYASWYQQKPGQAPMLVIYGKNNRPSGIPDRFSGSDSGDTASLTITGAQAEDEADYYCNSRDSSGYPVFGTGTKVTVL

SEQ ID NO: 1447 - protein, 488 aa, Artificial Sequence
  source: /note="Description of Artificial Sequence: Synthetic polypeptide"
MALPVTALLLPLALLLHAARPQVQLVQSGGGLVQPGRSLRLSCAASGFTFDDYAMHWVRQAPGKGLEWVSGISWNSGSIGYADSVKGRFTISRDNAKNSLYLQMNSLRAEDTAVYYCAKDGSSSWSWGYFDYWGQGTLVTVSSGGGGSGGGGSGGGGSSSELTQDPAVSVALGQTVRTTCQGDALRSYYASWYQQKPGQAPMLVIYGKNNRPSGIPDRFSGSDSGDTASLTITGAQAEDEADYYCNSRDSSGYPVFGTGTKVTVLTTTPAPRPPTPAPTIASQPLSLRPEACRPAAGGAVHTRGLDFACDIYIWAPLAGTCGVLLLSLVITLYCKRGRKKLLYIFKQPFMRPVQTTQEEDGCSCRFPEEEEGGCELRVKFSRSADAPAYKQGQNQLYNELNLGRREEYDVLDKRRGRDPEMGGKPRRKNPQEGLYNELQKDKMAEAYSEIGMKGERRRGKGHDGLYQGLSTATKDTYDALHMQALPPR

SEQ ID NO: 1448 - protein, 246 aa, Artificial Sequence
  source: /note="Description of Artificial Sequence: Synthetic polypeptide"
EVQLVESGGGLVQPGRSLRLSCAASGFTFDDYAMHWVRQAPGKGLEWVSGISWNSGSTGYADSVKGRFTISRDNAKNSLYLQMNSLRAEDTALYYCAKDSSSWYGGGSAFDIWGQGTMVTVSSGGGGSGGGGSGGGGSSSELTQEPAVSVALGQTVRITCQGDSLRSYYASWYQQKPGQAPVLVIFGRSRRPSGIPDRFSGSSSGNTASLIITGAQAEDEADYYCNSRDNTANHYVFGTGTKLTVL

SEQ ID NO: 1449 - protein, 490 aa, Artificial Sequence
  source: /note="Description of Artificial Sequence: Synthetic polypeptide"
MALPVTALLLPLALLLHAARPEVQLVESGGGLVQPGRSLRLSCAASGFTFDDYAMHWVRQAPGKGLEWVSGISWNSGSTGYADSVKGRFTISRDNAKNSLYLQMNSLRAEDTALYYCAKDSSSWYGGGSAFDIWGQGTMVTVSSGGGGSGGGGSGGGGSSSELTQEPAVSVALGQTVRITCQGDSLRSYYASWYQQKPGQAPVLVIFGRSRRPSGIPDRFSGSSSGNTASLIITGAQAEDEADYYCNSRDNTANHYVFGTGTKLTVLTTTPAPRPPTPAPTIASQPLSLRPEACRPAAGGAVHTRGLDFACDIYIWAPLAGTCGVLLLSLVITLYCKRGRKKLLYIFKQPFMRPVQTTQEEDGCSCRFPEEEEGGCELRVKFSRSADAPAYKQGQNQLYNELNLGRREEYDVLDKRRGRDPEMGGKPRRKNPQEGLYNELQKDKMAEAYSEIGMKGERRRGKGHDGLYQGLSTATKDTYDALHMQALPPR

SEQ ID NO: 1450 - protein, 246 aa, Artificial Sequence
  source: /note="Description of Artificial Sequence: Synthetic polypeptide"
EVQLVESGGGLVQPGRSLRLSCAASGFTFDDYAMHWVRQAPGKGLEWVSGISWNSGSTGYADSVKGRFTISRDNAKNSLYLQMNSLRAEDTALYYCAKDSSSWYGGGSAFDIWGQGTMVTVSSGGGGSGGGGSGGGGSSSELTQDPAVSVALGQTVRITCQGDSLRSYYASWYQQKPGQAPVLVIYGKNNRPSGIPDRFSGSSSGNTASLTITGAQAEDEADYYCNSRGSSGNHYVFGTGTKVTVL

SEQ ID NO: 1451 - protein, 490 aa, Artificial Sequence
  source: /note="Description of Artificial Sequence: Synthetic polypeptide"
MALPVTALLLPLALLLHAARPEVQLVESGGGLVQPGRSLRLSCAASGFTFDDYAMHWVRQAPGKGLEWVSGISWNSGSTGYADSVKGRFTISRDNAKNSLYLQMNSLRAEDTALYYCAKDSSSWYGGGSAFDIWGQGTMVTVSSGGGGSGGGGSGGGGSSSELTQDPAVSVALGQTVRITCQGDSLRSYYASWYQQKPGQAPVLVIYGKNNRPSGIPDRFSGSSSGNTASLTITGAQAEDEADYYCNSRGSSGNHYVFGTGTKVTVLTTTPAPRPPTPAPTIASQPLSLRPEACRPAAGGAVHTRGLDFACDIYIWAPLAGTCGVLLLSLVITLYCKRGRKKLLYIFKQPFMRPVQTTQEEDGCSCRFPEEEEGGCELRVKFSRSADAPAYKQGQNQLYNELNLGRREEYDVLDKRRGRDPEMGGKPRRKNPQEGLYNELQKDKMAEAYSEIGMKGERRRGKGHDGLYQGLSTATKDTYDALHMQALPPR

SEQ ID NO: 1452 - protein, 251 aa, Artificial Sequence
  source: /note="Description of Artificial Sequence: Synthetic polypeptide"
QVQLVQSGGGLVQPGGSLRLSCAASGFTFSSYWMHWVRQAPGKGLVWVSRINSDGSSTSYADSVKGRFTISRDNAKNTLYLQMNSLRAEDTAVYYCVRTGWVGSYYYYMDVWGKGTTVTVSSGGGGSGGGGSGGGGSGGGGSEIVLTQSPGTLSLSPGERATLSCRASQSVSSNYLAWYQQKPGQPPRLLIYDVSTRATGIPARFSGGGSGTDFTLTISSLEPEDFAVYYCQQRSNWPPWTFGQGTKVEIK

SEQ ID NO: 1453 - protein, 495 aa, Artificial Sequence
  source: /note="Description of Artificial Sequence: Synthetic polypeptide"
MALPVTALLLPLALLLHAARPQVQLVQSGGGLVQPGGSLRLSCAASGFTFSSYWMHWVRQAPGKGLVWVSRINSDGSSTSYADSVKGRFTISRDNAKNTLYLQMNSLRAEDTAVYYCVRTGWVGSYYYYMDVWGKGTTVTVSSGGGGSGGGGSGGGGSGGGGSEIVLTQSPGTLSLSPGERATLSCRASQSVSSNYLAWYQQKPGQPPRLLIYDVSTRATGIPARFSGGGSGTDFTLTISSLEPEDFAVYYCQQRSNWPPWTFGQGTKVEIKTTTPAPRPPTPAPTIASQPLSLRPEACRPAAGGAVHTRGLDFACDIYIWAPLAGTCGVLLLSLVITLYCKRGRKKLLYIFKQPFMRPVQTTQEEDGCSCRFPEEEEGGCELRVKFSRSADAPAYKQGQNQLYNELNLGRREEYDVLDKRRGRDPEMGGKPRRKNPQEGLYNELQKDKMAEAYSEIGMKGERRRGKGHDGLYQGLSTATKDTYDALHMQALPPR

SEQ ID NO: 1454 - protein, 250 aa, Artificial Sequence
  source: /note="Description of Artificial Sequence: Synthetic polypeptide"
QVQLVQSGGGVVQPGRSLRLSCAASGFTFSSYGMHWVRQAPGKGLEWVAVISYDGSNKYYADSVKGRFTISRDNSKNTLYLQMNSLRAEDTAVYYCAKGYSRYYYYGMDVWGQGTTVTVSSGGGGSGGGGSGGGGSGGGGSEIVMTQSPATLSLSPGERAILSCRASQSVYTKYLGWYQQKPGQAPRLLIYDASTRATGIPDRFSGSGSGTDFTLTINRLEPEDFAVYYCQHYGGSPLITFGQGTKVDIK

SEQ ID NO: 1455 - protein, 494 aa, Artificial Sequence
  source: /note="Description of Artificial Sequence: Synthetic polypeptide"
MALPVTALLLPLALLLHAARPQVQLVQSGGGVVQPGRSLRLSCAASGFTFSSYGMHWVRQAPGKGLEWVAVISYDGSNKYYADSVKGRFTISRDNSKNTLYLQMNSLRAEDTAVYYCAKGYSRYYYYGMDVWGQGTTVTVSSGGGGSGGGGSGGGGSGGGGSEIVMTQSPATLSLSPGERAILSCRASQSVYTKYLGWYQQKPGQAPRLLIYDASTRATGIPDRFSGSGSGTDFTLTINRLEPEDFAVYYCQHYGGSPLITFGQGTKVDIKTTTPAPRPPTPAPTIASQPLSLRPEACRPAAGGAVHTRGLDFACDIYIWAPLAGTCGVLLLSLVITLYCKRGRKKLLYIFKQPFMRPVQTTQEEDGCSCRFPEEEEGGCELRVKFSRSADAPAYKQGQNQLYNELNLGRREEYDVLDKRRGRDPEMGGKPRRKNPQEGLYNELQKDKMAEAYSEIGMKGERRRGKGHDGLYQGLSTATKDTYDALHMQALPPR

SEQ ID NO: 1456 - protein, 249 aa, Artificial Sequence
  source: /note="Description of Artificial Sequence: Synthetic polypeptide"
QVQLVQSGGGLVQPGGSLRLSCAASGFTFSSYAMSWVRQAPGKGLEWVSAISGSGGSTYYADSVKGRFTISRDNSKNTLYLQMNSLRAEDTAVYYCAKREAAAGHDWYFDLWGRGTLVTVSSGGGGSGGGGSGGGGSGGGGSDIRVTQSPSSLSASVGDRVTITCRASQSISSYLNWYQQKPGKAPKLLIYAASSLQSGVPSRFSGSGSGTDFTLTISSLQPEDFATYYCQQSYSIPLTFGQGTKVEIK

SEQ ID NO: 1457 - protein, 493 aa, Artificial Sequence
  source: /note="Description of Artificial Sequence: Synthetic polypeptide"
MALPVTALLLPLALLLHAARPQVQLVQSGGGLVQPGGSLRLSCAASGFTFSSYAMSWVRQAPGKGLEWVSAISGSGGSTYYADSVKGRFTISRDNSKNTLYLQMNSLRAEDTAVYYCAKREAAAGHDWYFDLWGRGTLVTVSSGGGGSGGGGSGGGGSGGGGSDIRVTQSPSSLSASVGDRVTITCRASQSISSYLNWYQQKPGKAPKLLIYAASSLQSGVPSRFSGSGSGTDFTLTISSLQPEDFATYYCQQSYSIPLTFGQGTKVEIKTTTPAPRPPTPAPTIASQPLSLRPEACRPAAGGAVHTRGLDFACDIYIWAPLAGTCGVLLLSLVITLYCKRGRKKLLYIFKQPFMRPVQTTQEEDGCSCRFPEEEEGGCELRVKFSRSADAPAYKQGQNQLYNELNLGRREEYDVLDKRRGRDPEMGGKPRRKNPQEGLYNELQKDKMAEAYSEIGMKGERRRGKGHDGLYQGLSTATKDTYDALHMQALPPR

SEQ ID NO: 1458 - protein, 247 aa, Artificial Sequence
  source: /note="Description of Artificial Sequence: Synthetic polypeptide"
QVQLVQSWAEVKKPGASVKVSCKASGYTFTSYYMHWVRQAPGQGLEWMGIINPSGGSTSYAQKFQGRVTMTRDTSTSTVYMELSNLRSEDTAVYYCARSPRVTTGYFDYWGQGTLVTVSSGGGGSGGGGSGGGGSGGGGSDIQLTQSPSTLSASVGDRVTITCRASQSISSWLAWYQQKPGKAPKLLIYKASSLESGVPSRFSGSGSGTEFTLTISSLQPDDFATYYCQQYSSYPLTFGGGTRLEIK

SEQ ID NO: 1459 - protein, 491 aa, Artificial Sequence
  source: /note="Description of Artificial Sequence: Synthetic polypeptide"
MALPVTALLLPLALLLHAARPQVQLVQSWAEVKKPGASVKVSCKASGYTFTSYYMHWVRQAPGQGLEWMGIINPSGGSTSYAQKFQGRVTMTRDTSTSTVYMELSNLRSEDTAVYYCARSPRVTTGYFDYWGQGTLVTVSSGGGGSGGGGSGGGGSGGGGSDIQLTQSPSTLSASVGDRVTITCRASQSISSWLAWYQQKPGKAPKLLIYKASSLESGVPSRFSGSGSGTEFTLTISSLQPDDFATYYCQQYSSYPLTFGGGTRLEIKTTTPAPRPPTPAPTIASQPLSLRPEACRPAAGGAVHTRGLDFACDIYIWAPLAGTCGVLLLSLVITLYCKRGRKKLLYIFKQPFMRPVQTTQEEDGCSCRFPEEEEGGCELRVKFSRSADAPAYKQGQNQLYNELNLGRREEYDVLDKRRGRDPEMGGKPRRKNPQEGLYNELQKDKMAEAYSEIGMKGERRRGKGHDGLYQGLSTATKDTYDALHMQALPPR

SEQ ID NO: 1460 - protein, 253 aa, Artificial Sequence
  source: /note="Description of Artificial Sequence: Synthetic polypeptide"
QVQLVQSGAEVRRPGASVKISCRASGDTSTRHYIHWLRQAPGQGPEWMGVINPTTGPATGSPAYAQMLQGRVTMTRDTSTRTVYMELRSLRFEDTAVYYCARSVVGRSAPYYFDYWGQGTLVTVSSGGGGSGGGGSGGGGSGGGGSDIQMTQSPSSLSASVGDRVTITCRASQGISDYSAWYQQKPGKAPKLLIYAASTLQSGVPSRFSGSGSGTDFTLTISYLQSEDFATYYCQQYYSYPLTFGGGTKVDIK

SEQ ID NO: 1461 - protein, 497 aa, Artificial Sequence
  source: /note="Description of Artificial Sequence: Synthetic polypeptide"
MALPVTALLLPLALLLHAARPQVQLVQSGAEVRRPGASVKISCRASGDTSTRHYIHWLRQAPGQGPEWMGVINPTTGPATGSPAYAQMLQGRVTMTRDTSTRTVYMELRSLRFEDTAVYYCARSVVGRSAPYYFDYWGQGTLVTVSSGGGGSGGGGSGGGGSGGGGSDIQMTQSPSSLSASVGDRVTITCRASQGISDYSAWYQQKPGKAPKLLIYAASTLQSGVPSRFSGSGSGTDFTLTISYLQSEDFATYYCQQYYSYPLTFGGGTKVDIKTTTPAPRPPTPAPTIASQPLSLRPEACRPAAGGAVHTRGLDFACDIYIWAPLAGTCGVLLLSLVITLYCKRGRKKLLYIFKQPFMRPVQTTQEEDGCSCRFPEEEEGGCELRVKFSRSADAPAYKQGQNQLYNELNLGRREEYDVLDKRRGRDPEMGGKPRRKNPQEGLYNELQKDKMAEAYSEIGMKGERRRGKGHDGLYQGLSTATKDTYDALHMQALPPR

SEQ ID NO: 1462 - protein, 249 aa, Artificial Sequence
  source: /note="Description of Artificial Sequence: Synthetic polypeptide"
QVQLQQSGAEVKKPGASVKVSCKASGYTFTNYYMHWVRQAPGQGLEWMGIINPSGGYTTYAQKFQGRLTMTRDTSTSTVYMELSSLRSEDTAVYYCARIRSCGGDCYYFDNWGQGTLVTVSSGGGGSGGGGSGGGGSGGGGSDIQLTQSPSTLSASVGDRVTITCRASENVNIWLAWYQQKPGKAPKLLIYKSSSLASGVPSRFSGSGSGAEFTLTISSLQPDDFATYYCQQYQSYPLTFGGGTKVDIK

SEQ ID NO: 1463 - protein, 493 aa, Artificial Sequence
  source: /note="Description of Artificial Sequence: Synthetic polypeptide"
MALPVTALLLPLALLLHAARPQVQLQQSGAEVKKPGASVKVSCKASGYTFTNYYMHWVRQAPGQGLEWMGIINPSGGYTTYAQKFQGRLTMTRDTSTSTVYMELSSLRSEDTAVYYCARIRSCGGDCYYFDNWGQGTLVTVSSGGGGSGGGGSGGGGSGGGGSDIQLTQSPSTLSASVGDRVTITCRASENVNIWLAWYQQKPGKAPKLLIYKSSSLASGVPSRFSGSGSGAEFTLTISSLQPDDFATYYCQQYQSYPLTFGGGTKVDIKTTTPAPRPPTPAPTIASQPLSLRPEACRPAAGGAVHTRGLDFACDIYIWAPLAGTCGVLLLSLVITLYCKRGRKKLLYIFKQPFMRPVQTTQEEDGCSCRFPEEEEGGCELRVKFSRSADAPAYKQGQNQLYNELNLGRREEYDVLDKRRGRDPEMGGKPRRKNPQEGLYNELQKDKMAEAYSEIGMKGERRRGKGHDGLYQGLSTATKDTYDALHMQALPPR

SEQ ID NO: 1464 - protein, 246 aa, Artificial Sequence
  source: /note="Description of Artificial Sequence: Synthetic polypeptide"
QITLKESGPALVKPTQTLTLTCTFSGFSLSTAGVHVGWIRQPPGKALEWLALISWADDKRYRPSLRSRLDITRVTSKDQVVLSMTNMQPEDTATYYCALQGFDGYEANWGPGTLVTVSSGGGGSGGGGSGGGGSGGGGSDIVMTQSPSSLSASAGDRVTITCRASRGISSALAWYQQKPGKPPKLLIYDASSLESGVPSRFSGSGSGTDFTLTIDSLEPEDFATYYCQQSYSTPWTFGQGTKVDIK

SEQ ID NO: 1465 - protein, 490 aa, Artificial Sequence
  source: /note="Description of Artificial Sequence: Synthetic polypeptide"
MALPVTALLLPLALLLHAARPQITLKESGPALVKPTQTLTLTCTFSGFSLSTAGVHVGWIRQPPGKALEWLALISWADDKRYRPSLRSRLDITRVTSKDQVVLSMTNMQPEDTATYYCALQGFDGYEANWGPGTLVTVSSGGGGSGGGGSGGGGSGGGGSDIVMTQSPSSLSASAGDRVTITCRASRGISSALAWYQQKPGKPPKLLIYDASSLESGVPSRFSGSGSGTDFTLTIDSLEPEDFATYYCQQSYSTPWTFGQGTKVDIKTTTPAPRPPTPAPTIASQPLSLRPEACRPAAGGAVHTRGLDFACDIYIWAPLAGTCGVLLLSLVITLYCKRGRKKLLYIFKQPFMRPVQTTQEEDGCSCRFPEEEEGGCELRVKFSRSADAPAYKQGQNQLYNELNLGRREEYDVLDKRRGRDPEMGGKPRRKNPQEGLYNELQKDKMAEAYSEIGMKGERRRGKGHDGLYQGLSTATKDTYDALHMQALPPR

SEQ ID NO: 1466 - protein, 239 aa, Artificial Sequence
  source: /note="Description of Artificial Sequence: Synthetic polypeptide"
QVQLQQSGPELEKPGASVKISCKASGYSFTGYTMNWVKQSHGKSLEWIGLITPYNGASSYNQKFRGKATLTVDKSSSTAYMDLLSLTSEDSAVYFCARGGYDGRGFDYWGQGTTVTVSSGGGGSGGGGSGGGGSDIELTQSPAIMSASPGEKVTMTCSASSSVSYMHWYQQKSGTSPKRWIYDTSKLASGVPGRFSGSGSGNSYSLTISSVEAEDDATYYCQQWSGYPLTFGAGTKLEI

SEQ ID NO: 1467 - protein, 383 aa, Artificial Sequence
  source: /note="Description of Artificial Sequence: Synthetic polypeptide"
MALPVTALLLPLALLLHAARPQVQLQQSGPELEKPGASVKISCKASGYSFTGYTMNWVKQSHGKSLEWIGLITPYNGASSYNQKFRGKATLTVDKSSSTAYMDLLSLTSEDSAVYFCARGGYDGRGFDYWGQGTTVTVSSGGGGSGGGGSGGGGSDIELTQSPAIMSASPGEKVTMTCSASSSVSYMHWYQQKSGTSPKRWIYDTSKLASGVPGRFSGSGSGNSYSLTISSVEAEDDATYYCQQWSGYPLTFGAGTKLEITTTPAPRPPTPAPTIASQPLSLRPEACRPAAGGAVHTRGLDFACDIYIWAPLAGTCGVLLLSLVITLYCKRGRKKLLYIFKQPFMRPVQTTQEEDGCSCRFPEEEEGGCELRVKFSRSADAPA

SEQ ID NO: 1468 - RNA, 2000 nt, Artificial Sequence
  source: /note="Description of Artificial Sequence: Synthetic polynucleotide"
  misc_feature (1)..(2000): /note="This sequence may encompass 50-2000 nucleotides"
aaaaaaaaaaaaaaaaaaaaaaaaaaaaaaaaaaaaaaaaaaaaaaaaaaaaaaaaaaaaaaaaaaaaaaaaaaaaaaaaaaaaaaaaaaaaaaaaaaaaaaaaaaaaaaaaaaaaaaaaaaaaaaaaaaaaaaaaaaaaaaaaaaaaaaaaaaaaaaaaaaaaaaaaaaaaaaaaaaaaaaaaaaaaaaaaaaaaaaaaaaaaaaaaaaaaaaaaaaaaaaaaaaaaaaaaaaaaaaaaaaaaaaaaaaaaaaaaaaaaaaaaaaaaaaaaaaaaaaaaaaaaaaaaaaaaaaaaaaaaaaaaaaaaaaaaaaaaaaaaaaaaaaaaaaaaaaaaaaaaaaaaaaaaaaaaaaaaaaaaaaaaaaaaaaaaaaaaaaaaaaaaaaaaaaaaaaaaaaaaaaaaaaaaaaaaaaaaaaaaaaaaaaaaaaaaaaaaaaaaaaaaaaaaaaaaaaaaaaaaaaaaaaaaaaaaaaaaaaaaaaaaaaaaaaaaaaaaaaaaaaaaaaaaaaaaaaaaaaaaaaaaaaaaaaaaaaaaaaaaaaaaaaaaaaaaaaaaaaaaaaaaaaaaaaaaaaaaaaaaaaaaaaaaaaaaaaaaaaaaaaaaaaaaaaaaaaaaaaaaaaaaaaaaaaaaaaaaaaaaaaaaaaaaaaaaaaaaaaaaaaaaaaaaaaaaaaaaaaaaaaaaaaaaaaaaaaaaaaaaaaaaaaaaaaaaaaaaaaaaaaaaaaaaaaaaaaaaaaaaaaaaaaaaaaaaaaaaaaaaaaaaaaaaaaaaaaaaaaaaaaaaaaaaaaaaaaaaaaaaaaaaaaaaaaaaaaaaaaaaaaaaaaaaaaaaaaaaaaaaaaaaaaaaaaaaaaaaaaaaaaaaaaaaaaaaaaaaaaaaaaaaaaaaaaaaaaaaaaaaaaaaaaaaaaaaaaaaaaaaaaaaaaaaaaaaaaaaaaaaaaaaaaaaaaaaaaaaaaaaaaaaaaaaaaaaaaaaaaaaaaaaaaaaaaaaaaaaaaaaaaaaaaaaaaaaaaaaaaaaaaaaaaaaaaaaaaaaaaaaaaaaaaaaaaaaaaaaaaaaaaaaaaaaaaaaaaaaaaaaaaaaaaaaaaaaaaaaaaaaaaaaaaaaaaaaaaaaaaaaaaaaaaaaaaaaaaaaaaaaaaaaaaaaaaaaaaaaaaaaaaaaaaaaaaaaaaaaaaaaaaaaaaaaaaaaaaaaaaaaaaaaaaaaaaaaaaaaaaaaaaaaaaaaaaaaaaaaaaaaaaaaaaaaaaaaaaaaaaaaaaaaaaaaaaaaaaaaaaaaaaaaaaaaaaaaaaaaaaaaaaaaaaaaaaaaaaaaaaaaaaaaaaaaaaaaaaaaaaaaaaaaaaaaaaaaaaaaaaaaaaaaaaaaaaaaaaaaaaaaaaaaaaaaaaaaaaaaaaaaaaaaaaaaaaaaaaaaaaaaaaaaaaaaaaaaaaaaaaaaaaaaaaaaaaaaaaaaaaaaaaaaaaaaaaaaaaaaaaaaaaaaaaaaaaaaaaaaaaaaaaaaaaaaaaaaaaaaaaaaaaaaaaaaaaaaaaaaaaaaaaaaaaaaaaaaaaaaaaaaaaaaaaaaaaaaaaaaaaaaaaaaaaaaaaaaaaaaaaaaaaaaaaaaaaaaaaaaaaaaaaaaaaaaaaaaaaaaaaaaaaaaaaaaaaaaaaaaaaaaaaaaaaaaaaaaaaaaaaaaaaaaaaaaaaaaaaaaaaaaaaaaaaaaaaaaaaaaaaaaaaaaaaaaaaaaaaaaaaaaaaaaaaaaaaaaaaaaaaaaaaaaaaaaaaaaaaaaaaaaaaaaaaaaaaaaaaaaaaaaaaaaaaaaaaaaaaaaaaaaaaaaaaaaaaaaaaaaaaaaaaaaaaaaaaaaaaaaaaaaaaaaaaaaaaaaaaaaaaaaaaaaaaaaaaaaaaaaaaaaaaaaaaaaaaaaaaaaaaaaaaaaaaaaaaaaaaaaaaaaaaaaaaaaaaaaaaaaaaaaaaaaaaaaaaaaaaaaaaaaaaaaaaaaaaaaaaaaaaaa

SEQ ID NO: 1469 - DNA, 100 bp, Artificial Sequence
  source: /note="Description of Artificial Sequence: Synthetic polynucleotide"
tttttttttttttttttttttttttttttttttttttttttttttttttttttttttttttttttttttttttttttttttttttttttttttttttttt

SEQ ID NO: 1470 - DNA, 5000 bp, Artificial Sequence
  source: /note="Description of Artificial Sequence: Synthetic polynucleotide"
  misc_feature (1)..(5000): /note="This sequence may encompass 50-5000 nucleotides"
tttttttttttttttttttttttttttttttttttttttttttttttttttttttttttttttttttttttttttttttttttttttttttttttttttttttttttttttttttttttttttttttttttttttttttttttttttttttttttttttttttttttttttttttttttttttttttttttttttttttttttttttttttttttttttttttttttttttttttttttttttttttttttttttttttttttttttttttttttttttttttttttttttttttttttttttttttttttttttttttttttttttttttttttttttttttttttttttttttttttttttttttttttttttttttttttttttttttttttttttttttttttttttttttttttttttttttttttttttttttttttttttttttttttttttttttttttttttttttttttttttttttttttttttttttttttttttttttttttttttttttttttttttttttttttttttttttttttttttttttttttttttttttttttttttttttttttttttttttttttttttttttttttttttttttttttttttttttttttttttttttttttttttttttttttttttttttttttttttttttttttttttttttttttttttttttttttttttttttttttttttttttttttttttttttttttttttttttttttttttttttttttttttttttttttttttttttttttttttttttttttttttttttttttttttttttttttttttttttttttttttttttttttttttttttttttttttttttttttttttttttttttttttttttttttttttttttttttttttttttttttttttttttttttttttttttttttttttttttttttttttttttttttttttttttttttttttttttttttttttttttttttttttttttttttttttttttttttttttttttttttttttttttttttttttttttttttttttttttttttttttttttttttttttttttttttttttttttttttttttttttttttttttttttttttttttttttttttttttttttttttttttttttttttttttttttttttttttttttttttttttttttttttttttttttttttttttttttttttttttttttttttttttttttttttttttttttttttttttttttttttttttttttttttttttttttttttttttttttttttttttttttttttttttttttttttttttttttttttttttttttttttttttttttttttttttttttttttttttttttttttttttttttttttttttttttttttttttttttttttttttttttttttttttttttttttttttttttttttttttttttttttttttttttttttttttttttttttttttttttttttttttttttttttttttttttttttttttttttttttttttttttttttttttttttttttttttttttttttttttttttttttttttttttttttttttttttttttttttttttttttttttttttttttttttttttttttttttttttttttttttttttttttttttttttttttttttttttttttttttttttttttttttttttttttttttttttttttttttttttttttttttttttttttttttttttttttttttttttttttttttttttttttttttttttttttttttttttttttttttttttttttttttttttttttttttttttttttttttttttttttttttttttttttttttttttttttttttttttttttttttttttttttttttttttttttttttttttttttttttttttttttttttttttttttttttttttttttttttttttttttttttttttttttttttttttttttttttttttttttttttttttttttttttttttttttttttttttttttttttttttttttttttttttttttttttttttttttttttttttttttttttttttttttttttttttttttttttttttttttttttttttttttttttttttttttttttttttttttttttttttttttttttttttttttttttttttttttttttttttttttttttttttttttttttttttttttttttttttttttttttttttttttttttttttttttttttttttttttttttttttttttttttttttttttttttttttttttttttttttttttttttttttttttttttttttttttttttttttttttttttttttttttttttttttttttttttttttttttttttttttttttttttttttttttttttttttttttttttttttttttttttttttttttttttttttttttttttttttttttttttttttttttttttttttttttttttttttttttttttttttttttttttttttttttttttttttttttttttttttttttttttttttttttttttttttttttttttttttttttttttttttttttttttttttttttttttttttttttttttttttttttttttttttttttttttttttttttttttttttttttttttttttttttttttttttttttttttttttttttttttttttttttttttttttttttttttttttttttttttttttttttttttttttttttttttttttttttttttttttttttttttttttttttttttttttttttttttttttttttttttttttttttttttttttttttttttttttttttttttttttttttttttttttttttttttttttttttttttttttttttttttttttttttttttttttttttttttttttttttttttttttttttttttttttttttttttttttttttttttttttttttttttttttttttttttttttttttttttttttttttttttttttttttttttttttttttttttttttttttttttttttttttttttttttttttttttttttttttttttttttttttttttttttttttttttttttttttttttttttttttttttttttttttttttttttttttttttttttttttttttttttttttttttttttttttttttttttttttttttttttttttttttttttttttttttttttttttttttttttttttttttttttttttttttttttttttttttttttttttttttttttttttttttttttttttttttttttttttttttttttttttttttttttttttttttttttttttttttttttttttttttttttttttttttttttttttttttttttttttttttttttttttttttttttttttttttttttttttttttttttttttttttttttttttttttttttttttttttttttttttttttttttttttttttttttttttttttttttttttttttttttttttttttttttttttttttttttttttttttttttttttttttttttttttttttttttttttttttttttttttttttttttttttttttttttttttttttttttttttttttttttttttttttttttttttttttttttttttttttttttttttttttttttttttttttttttttttttttttttttttttttttttttttttttttttttttttttttttttttttttttttttttttttttttttttttttttttttttttttttttttttttttttttttttttttttttttttttttttttttttttttttttttttttttttttttttttttttttttttttttttttttttttttttttttttttttttttttttttttttttttttttttttttttttttttttttttttttttttttttttttttttttttttttttttttttttttttttttttttttttttttttttttttttttttttttttttttttttttttttttttttttttttttttttttttttttttttttttttttttttttttttttttttttttttttttttttttttttttttttttttttttttttttttttttttttttttttttttttttttttttttttttttttttttttttttttttttttttttttttttttttttttttttttttttttttttttttttttttttttttttttttttttttttttttttttttttttttttttttttttttttttttttttttttttttttttttttttttttttttttttttttttttttttttttttttttttttttttttttttttttttttttttttttttttttttttttttttttttttttttttttttttttttttttttttttttttttttttttttttttttttttttttttttttttttttttttttttttttttttttttttttttttttttttttttttttttttttttttttttttttttttttttttttttttttttttttttttttttttttttttttttttttttttttttttttttttttttttttttttttttttttttttttttttttttttttttttttttttttttttttttttttttttttttttttttttttttttttttttttttttttttttttttttttttttttttttttttttttttttttttttttttttttttttttttttttttttttttttttttttttttttttttttttttttttttttttttttttttttttttttttttttttttttttttttttttttttttttttttttttttttttttttttttttttttttttttttttttttttttttttttttttttttttttttttttttttttttttttttt

SEQ ID NO: 1471 - RNA, 5000 nt, Artificial Sequence; identical to SEQ ID NO: 1013
  source: /note="Description of Artificial Sequence: Synthetic polynucleotide"
  misc_feature (1)..(5000): /note="This sequence may encompass 100-5000 nucleotides"

SEQ ID NO: 1472 - RNA, 400 nt, Artificial Sequence
  source: /note="Description of Artificial Sequence: Synthetic polynucleotide"
  misc_feature (1)..(400): /note="This sequence may encompass 100-400 nucleotides"
  source: /note="See specification as filed for detailed description of substitutions and preferred embodiments"
aaaaaaaaaaaaaaaaaaaaaaaaaaaaaaaaaaaaaaaaaaaaaaaaaaaaaaaaaaaaaaaaaaaaaaaaaaaaaaaaaaaaaaaaaaaaaaaaaaaaaaaaaaaaaaaaaaaaaaaaaaaaaaaaaaaaaaaaaaaaaaaaaaaaaaaaaaaaaaaaaaaaaaaaaaaaaaaaaaaaaaaaaaaaaaaaaaaaaaaaaaaaaaaaaaaaaaaaaaaaaaaaaaaaaaaaaaaaaaaaaaaaaaaaaaaaaaaaaaaaaaaaaaaaaaaaaaaaaaaaaaaaaaaaaaaaaaaaaaaaaaaaaaaaaaaaaaaaaaaaaaaaaaaaaaaaaaaaaaaaaaaaaaaaaaaaaaaaaaaaaaaaaaaaaaaaaaaaaaaaaaaaaaaaaaaaaaaaaaaa

SEQ ID NO: 1473 - DNA, 521 bp, Unknown
  source: /note="Description of Unknown: PGK Promoter sequence"
acccctctctccagccactaagccagttgctccctcggctgacggctgcacgcgaggcctccgaacgtcttacgccttgtggcgcgcccgtccttgtcccgggtgtgatggcggggtgtggggcggagggcgtggcggggaagggccggcgacgagagccgcgcgggacgactcgtcggcgataaccggtgtcgggtagcgccagccgcgcgacggtaacgagggaccgcgacaggcagacgctcccatgatcactctgcacgccgaaggcaaatagtgcaggccgtgcggcgcttggcgttccttggaagggctgaatccccgcctcgtccttcgcagcggccccccgggtgttcccatcgccgcttctaggcccactgcgacgcttgcctgcacttcttacacgctctgggtcccagccgcggcgacgcaaagggccttggtgcgggtctcgtcggcgcagggacgcgtttgggtcccgacggaaccttttccgcgttggggttggggcaccataagct

SEQ ID NO: 1474 - DNA, 118 bp, Artificial Sequence
  source: /note="Description of Artificial Sequence: Synthetic polynucleotide"
acccctctctccagccactaagccagttgctccctcggctgacggctgcacgcgaggcctccgaacgtcttacgccttgtggcgcgcccgtccttgtcccgggtgtgatggcggggtg

SEQ ID NO: 1475 - DNA, 221 bp, Artificial Sequence
  source: /note="Description of Artificial Sequence: Synthetic polynucleotide"
acccctctctccagccactaagccagttgctccctcggctgacggctgcacgcgaggcctccgaacgtcttacgccttgtggcgcgcccgtccttgtcccgggtgtgatggcggggtgtggggcggagggcgtggcggggaagggccggcgacgagagccgcgcgggacgactcgtcggcgataaccggtgtcgggtagcgccagccgcgcgacggtaacg

SEQ ID NO: 1476 - DNA, 324 bp, Artificial Sequence
  source: /note="Description of Artificial Sequence: Synthetic polynucleotide"
acccctctctccagccactaagccagttgctccctcggctgacggctgcacgcgaggcctccgaacgtcttacgccttgtggcgcgcccgtccttgtcccgggtgtgatggcggggtgtggggcggagggcgtggcggggaagggccggcgacgagagccgcgcgggacgactcgtcggcgataaccggtgtcgggtagcgccagccgcgcgacggtaacgagggaccgcgacaggcagacgctcccatgatcactctgcacgccgaaggcaaatagtgcaggccgtgcggcgcttggcgttccttggaagggctgaatccccg

SEQ ID NO: 1477 - DNA, 422 bp, Artificial Sequence
  source: /note="Description of Artificial Sequence: Synthetic polynucleotide"
acccctctctccagccactaagccagttgctccctcggctgacggctgcacgcgaggcctccgaacgtcttacgccttgtggcgcgcccgtccttgtcccgggtgtgatggcggggtgtggggcggagggcgtggcggggaagggccggcgacgagagccgcgcgggacgactcgtcggcgataaccggtgtcgggtagcgccagccgcgcgacggtaacgagggaccgcgacaggcagacgctcccatgatcactctgcacgccgaaggcaaatagtgcaggccgtgcggcgcttggcgttccttggaagggctgaatccccgcctcgtccttcgcagcggccccccgggtgttcccatcgccgcttctaggcccactgcgacgcttgcctgcacttcttacacgctctgggtcccagccg

SEQ ID NO: 1478 - protein, 21 aa, Artificial Sequence
  source: /note="Description of Artificial Sequence: Synthetic peptide"
  SITE (1)..(3): /note="This region may or may not be present"
GSGEGRGSLLTCGDVEENPGP

SEQ ID NO: 1479 - protein, 22 aa, Artificial Sequence
  source: /note="Description of Artificial Sequence: Synthetic peptide"
  SITE (1)..(3): /note="This region may or may not be present"
GSGATNFSLLKQAGDVEENPGP

SEQ ID NO: 1480 - protein, 23 aa, Artificial Sequence
  source: /note="Description of Artificial Sequence: Synthetic peptide"
  SITE (1)..(3): /note="This region may or may not be present"
GSGQCTNYALLKLAGDVESNPGP

SEQ ID NO: 1481 - protein, 25 aa, Artificial Sequence
  source: /note="Description of Artificial Sequence: Synthetic peptide"
  SITE (1)..(3): /note="This region may or may not be present"
GSGVKQTLNFDLLKLAGDVESNPGP

SEQ ID NO: 1482 - protein, 4 aa, Artificial Sequence
  source: /note="Description of Artificial Sequence: Synthetic peptide"
RGDS

SEQ ID NO: 1483-1999 - skipped (517 entries)

SEQ ID NO: 2000 - protein, 464 aa, Homo sapiens
MSDGNPELLSTSQTYNGQSENNEDYEIPPITPPNLPEPSLLHLGDHEASYHSLCHGLTPNGLLPAYSYQAMDLPAIMVSNMLAQDSHLLSGQLPTIQEMVHSEVAAYDSGRPGPLLGRPAMLASHMSALSQSQLISQMGIRSSIAHSSPSPPGSKSATPSPSSSTQEEESEVHFKISGEKRPSADPGKKAKNPKKKKKKDPNEPQKPVSAYALFFRDTQAAIKGQNPSATFGDVSKIVASMWDSLGEEQKQAYKRKTEAAKKEYLKALAAYRASLVSKSSPDQGETKSTQANPPAKMLPPKQPMYAMPGLASFLTPSDLQAFRSGASPASLARTLGSKSLLPGLSASPPPPPSFPLSPTLHQQLSLPPHAQGALLSPPVSMSPAPQPPVLPTPMALQVQLAMSPSPPGPQDFPHISEFPSSSGSCSPGPSNPTSSGDWDSSYPSGECGISTCSLLPRDKSLYLT

SEQ ID NO: 2001 - protein, 506 aa, Homo sapiens
MDVRLYPSAPAVGARPGAEPAGLAHLDYYHGGKFDGDSAYVGMSDGNPELLSTSQTYNGQSENNEDYEIPPITPPNLPEPSLLHLGDHEASYHSLCHGLTPNGLLPAYSYQAMDLPAIMVSNMLAQDSHLLSGQLPTIQEMVHSEVAAYDSGRPGPLLGRPAMLASHMSALSQSQLISQMGIRSSIAHSSPSPPGSKSATPSPSSSTQEEESEVHFKISGEKRPSADPGKKAKNPKKKKKKDPNEPQKPVSAYALFFRDTQAAIKGQNPSATFGDVSKIVASMWDSLGEEQKQAYKRKTEAAKKEYLKALAAYRASLVSKSSPDQGETKSTQANPPAKMLPPKQPMYAMPGLASFLTPSDLQAFRSGASPASLARTLGSKSLLPGLSASPPPPPSFPLSPTLHQQLSLPPHAQGALLSPPVSMSPAPQPPVLPTPMALQVQLAMSPSPPGPQDFPHISEFPSSSGSCSPGPSNPTSSGDWDSSYPSGECGISTCSLLPRDKSLYLT

SEQ ID NO: 2002 - protein, 488 aa, Homo sapiens
MQQTRTEAVAGAFSRCLGFCGMRLGLLLLARHWCIAGVFPQKFDGDSAYVGMSDGNPELLSTSQTYNGQSENNEDYEIPPITPPNLPEPSLLHLGDHEASYHSLCHGLTPNGLLPAYSYQAMDLPAIMVSNMLAQDSHLLSGQLPTIQEMVHSEVAAYDSGRPGPLLGRPAMLASHMSALSQSQLISQMGIRSSIAHSSPSPPGSKSATPSPSSSTQEEESEVHFKISGEKRPSADPGKKAKNPKKKKKKDPNEPQKPVSAYALFFRDTQAAIKGQNPSATFGDVSKIVASMWDSLGEEQKQSSPDQGETKSTQANPPAKMLPPKQPMYAMPGLASFLTPSDLQAFRSGASPASLARTLGSKSLLPGLSASPPPPPSFPLSPTLHQQLSLPPHAQGALLSPPVSMSPAPQPPVLPTPMALQVQLAMSPSPPGPQDFPHISEFPSSSGSCSPGPSNPTSSGDWDSSYPSGECGISTCSLLPRDKSLYLT

SEQ ID NO: 2003 - protein, 464 aa, Homo sapiens; identical to SEQ ID NO: 2000

SEQ ID NO: 2004 - DNA, 2433 bp, Homo sapiens
gattgaacagcgcgcgtgggtttcccgcagccctggcgcagacgcgtgggctccgtggcgatgcgggtttgatggtgacagtgcctacgtggggatgagtgacggaaacccagagctcctgtcaaccagccagacctacaacggccagagcgagaacaacgaagactatgagatccccccgataacacctcccaacctcccggagccatccctcctgcacctgggggaccacgaagccagctaccactcgctgtgccacggcctcacccccaacggtctgctccctgcctactcctatcaggccatggacctcccagccatcatggtgtccaacatgctagcacaggacagccacctgctgtcgggccagctgcccacgatccaggagatggtccactcggaagtggctgcctatgactcgggccggcccgggcccctgctgggtcgcccggcaatgctggccagccacatgagtgccctcagccagtcccagctcatctcgcagatgggcatccggagcagcatcgcccacagctccccatcaccgccggggagcaagtcagcgaccccctctccctccagctccactcaggaagaggagtcggaagtgcatttcaagatctcgggagaaaagagaccttcagccgacccaggaaaaaaggccaagaacccgaagaagaagaaaaagaaggaccccaatgagccgcagaagcctgtgtcggcctacgcactcttcttcagagacactcaggccgccatcaagggtcagaaccccagtgccactttcggtgacgtgtccaaaatcgtggcctccatgtgggacagcctgggagaggaacagaagcaggcctacaagaggaagacagaagcagcaaagaaggaatatctgaaggccctggcagcctaccgggctagcctcgtctccaagagctccccagatcaaggtgagaccaagagcactcaggcaaacccaccagccaaaatgctcccacccaagcagcccatgtatgccatgccaggcctggcctccttcctgacgccgtcggacctgcaggccttccgcagtggggcctcccctgccagcctcgcccggacgctgggctccaagtctctgctgccaggcctcagtgcgtccccgccgccgccaccctccttcccgctcagccccacactgcaccagcagctgtcactgccccctcacgcccagggcgccctcctcagtccacctgttagcatgtccccagccccccagccccctgtcctgcccacccccatggcactccaggtgcagctggcgatgagcccctcacctccagggccacaggacttcccgcacatctctgagttccccagcagctcgggatcctgctcacctggcccatccaaccccaccagcagcggggactgggacagcagctaccccagtggggagtgtggcatcagcacctgcagcctgctccccagggacaaatcgctctacctcacctaatcccgcctccctaccatccctgaggctcgctggaaggcactgctcagagcctgaagggctgacagcagaaaagaggccctggccagaggcagggtggcccatcggagagagcagtgacacacccattgcccgggggctgagtctcttcctcaacctcccaccagactctgcagaggcagcccactgcccaccaccagcccaaagaacctgcaggaaccttccgcccgctgacctgcttgctccagggtaactgtggaccctgtcctcgccctgcgcacggtaccctatgtctggacacccggccccagctccagccccagcccaggtgggccgcccctggcggggtcgcttaccaacggacacccaccccagatgcatgggccagagggccggcccccggcatagatgtgcacatcggttttccagtgtgaacaaaagattacgaaacctagaaactgttggttccgtgtaagtagttgactacgtgttttagaactgtgctgaagacatctgtaagactattttgtgggggaaaaaagtagtttcctttaaggtaaaaagcattttatatgatccttagcacatttttaagttttatcttaagggagacgcgcacaaaagcggctgccaaaccgtttcgtcatcctcacagcaaggaccggacgcttgctagccaccccggagcactgctctccttttaatcatgtattcatctattttaaattgccggcgacgacttttgtctatttatgaagaaaccttgagaacgaagttacagcttatcctaccgtgtgtgtggttttggggtttcgtttgggtttgggttcttgacgtcgtttgcagctgtttcctggccctggcgagtgtctgtcttggtgcccagtgcttctctcaaatctctttataataaaacttctgaaaagctgaaaaaaaaaaaaaaaaaa

SEQ ID NO: 2005 - DNA, 2491 bp, Homo sapiens
actgcccgcgggagccgccgccgccgccgccgcgcccgccatggacgtccgcctgtacccctcggcgcccgcggtgggcgcgcggcccggggccgagccggccggcctggcgcacctggactattaccacggcggcaagtttgatggtgacagtgcctacgtggggatgagtgacggaaacccagagctcctgtcaaccagccagacctacaacggccagagcgagaacaacgaagactatgagatccccccgataacacctcccaacctcccggagccatccctcctgcacctgggggaccacgaagccagctaccactcgctgtgccacggcctcacccccaacggtctgctccctgcctactcctatcaggccatggacctcccagccatcatggtgtccaacatgctagcacaggacagccacctgctgtcgggccagctgcccacgatccaggagatggtccactcggaagtggctgcctatgactcgggccggcccgggcccctgctgggtcgcccggcaatgctggccagccacatgagtgccctcagccagtcccagctcatctcgcagatgggcatccggagcagcatcgcccacagctccccatcaccgccggggagcaagtcagcgaccccctctccctccagctccactcaggaagaggagtcggaagtgcatttcaagatctcgggagaaaagagaccttcagccgacccaggaaaaaaggccaagaacccgaagaagaagaaaaagaaggaccccaatgagccgcagaagcctgtgtcggcctacgcactcttcttcagagacactcaggccgccatcaagggtcagaaccccagtgccactttcggtgacgtgtccaaaatcgtggcctccatgtgggacagcctgggagaggaacagaagcaggcctacaagaggaagacagaagcagcaaagaaggaatatctgaaggccctggcagcctaccgggctagcctcgtctccaagagctccccagatcaaggtgagaccaagagcactcaggcaaacccaccagccaaaatgctcccacccaagcagcccatgtatgccatgccaggcctggcctccttcctgacgccgtcggacctgcaggccttccgcagtggggcctcccctgccagcctcgcccggacgctgggctccaagtctctgctgccaggcctcagtgcgtccccgccgccgccaccctccttcccgctcagccccacactgcaccagcagctgtcactgccccctcacgcccagggcgccctcctcagtccacctgttagcatgtccccagccccccagccccctgtcctgcccacccccatggcactccaggtgcagctggcgatgagcccctcacctccagggccacaggacttcccgcacatctctgagttccccagcagctcgggatcctgctcacctggcccatccaaccccaccagcagcggggactgggacagcagctaccccagtggggagtgtggcatcagcacctgcagcctgctccccagggacaaatcgctctacctcacctaatcccgcctccctaccatccctgaggctcgctggaaggcactgctcagagcctgaagggctgacagcagaaaagaggccctggccagaggcagggtggcccatcggagagagcagtgacacacccattgcccgggggctgagtctcttcctcaacctcccaccagactctgcagaggcagcccactgcccaccaccagcccaaagaacctgcaggaaccttccgcccgctgacctgcttgctccagggtaactgtggaccctgtcctcgccctgcgcacggtaccctatgtctggacacccggccccagctccagccccagcccaggtgggccgcccctggcggggtcgcttaccaacggacacccaccccagatgcatgggccagagggccggcccccggcatagatgtgcacatcggttttccagtgtgaacaaaagattacgaaacctagaaactgttggttccgtgtaagtagttgactacgtgttttagaactgtgctgaagacatctgtaagactattttgtgggggaaaaaagtagtttcctttaaggtaaaaagcattttatatgatccttagcacatttttaagttttatcttaagggagacgcgcacaaaagcggctgccaaaccgtttcgtcatcctcacagcaaggaccggacgcttgctagccaccccggagcactgctctccttttaatcatgtattcatctattttaaattgccggcgacgacttttgtctatttatgaagaaaccttgagaacgaagttacagcttatcctaccgtgtgtgtggttttggggtttcgtttgggtttgggttcttgacgtcgtttgcagctgtttcctggccctggcgagtgtctgtcttggtgcccagtgcttctctcaaatctctttataataaaacttctgaaaagctgaaaa

SEQ ID NO: 2006 - DNA, 2428 bp, Homo sapiens
ctctttctctgctgattatgcagcagactcgcacagaggctgtcgcgggcgcgttctctcgctgcctgggcttctgtggaatgagactcgggctccttctacttgcaagacactggtgcattgcaggtgtgtttccgcagaagtttgatggtgacagtgcctacgtggggatgagtgacggaaacccagagctcctgtcaaccagccagacctacaacggccagagcgagaacaacgaagactatgagatccccccgataacacctcccaacctcccggagccatccctcctgcacctgggggaccacgaagccagctaccactcgctgtgccacggcctcacccccaacggtctgctccctgcctactcctatcaggccatggacctcccagccatcatggtgtccaacatgctagcacaggacagccacctgctgtcgggccagctgcccacgatccaggagatggtccactcggaagtggctgcctatgactcgggccggcccgggcccctgctgggtcgcccggcaatgctggccagccacatgagtgccctcagccagtcccagctcatctcgcagatgggcatccggagcagcatcgcccacagctccccatcaccgccggggagcaagtcagcgaccccctctccctccagctccactcaggaagaggagtcggaagtgcatttcaagatctcgggagaaaagagaccttcagccgacccaggaaaaaaggccaagaacccgaagaagaagaaaaagaaggaccccaatgagccgcagaagcctgtgtcggcctacgcactcttcttcagagacactcaggccgccatcaagggtcagaaccccagtgccactttcggtgacgtgtccaaaatcgtggcctccatgtgggacagcctgggagaggaacagaagcagagctccccagatcaaggtgagaccaagagcactcaggcaaacccaccagccaaaatgctcccacccaagcagcccatgtatgccatgccaggcctggcctccttcctgacgccgtcggacctgcaggccttccgcagtggggcctcccctgccagcctcgcccggacgctgggctccaagtctctgctgccaggcctcagtgcgtccccgccgccgccaccctccttcccgctcagccccacactgcaccagcagctgtcactgccccctcacgcccagggcgccctcctcagtccacctgttagcatgtccccagccccccagccccctgtcctgcccacccccatggcactccaggtgcagctggcgatgagcccctcacctccagggccacaggacttcccgcacatctctgagttccccagcagctcgggatcctgctcacctggcccatccaaccccaccagcagcggggactgggacagcagctaccccagtggggagtgtggcatcagcacctgcagcctgctccccagggacaaatcgctctacctcacctaatcccgcctccctaccatccctgaggctcgctggaaggcactgctcagagcctgaagggctgacagcagaaaagaggccctggccagaggcagggtggcccatcggagagagcagtgacacacccattgcccgggggctgagtctcttcctcaacctcccaccagactctgcagaggcagcccactgcccaccaccagcccaaagaacctgcaggaaccttccgcccgctgacctgcttgctccagggtaactgtggaccctgtcctcgccctgcgcacggtaccctatgtctggacacccggccccagctccagccccagcccaggtgggccgcccctggcggggtcgcttaccaacggacacccaccccagatgcatgggccagagggccggcccccggcatagatgtgcacatcggttttccagtgtgaacaaaagattacgaaacctagaaactgttggttccgtgtaagtagttgactacgtgttttagaactgtgctgaagacatctgtaagactattttgtgggggaaaaaagtagtttcctttaaggtaaaaagcattttatatgatccttagcacatttttaagttttatcttaagggagacgcgcacaaaagcggctgccaaaccgtttcgtcatcctcacagcaaggaccggacgcttgctagccaccccggagcactgctctccttttaatcatgtattcatctattttaaattgccggcgacgacttttgtctatttatgaagaaaccttgagaacgaagttacagcttatcctaccgtgtgtgtggttttggggtttcgtttgggtttgggttcttgacgtcgtttgcagctgtttcctggccctggcgagtgtctgtcttggtgcccagtgcttctctcaaatctctttataataaaacttctgaaaagctgaaaaaaaaaaaaaaaaaa

SEQ ID NO: 2007 - DNA, 2558 bp, Homo sapiens
gattgaacagcgcgcgtgggtttcccgcagccctggcgcagacgcgtgggctccgtggcgatgcggggtgttgcctgaggctccactgaagctatggcataatttgcagaatttgcacttcattacttttctgaaattcaaacaaattctgaaactgcacgagttctggctgagagctgtggatctgtgcattttgatggtgacagtgcctacgtggggatgagtgacggaaacccagagctcctgtcaaccagccagacctacaacggccagagcgagaacaacgaagactatgagatccccccgataacacctcccaacctcccggagccatccctcctgcacctgggggaccacgaagccagctaccactcgctgtgccacggcctcacccccaacggtctgctccctgcctactcctatcaggccatggacctcccagccatcatggtgtccaacatgctagcacaggacagccacctgctgtcgggccagctgcccacgatccaggagatggtccactcggaagtggctgcctatgactcgggccggcccgggcccctgctgggtcgcccggcaatgctggccagccacatgagtgccctcagccagtcccagctcatctcgcagatgggcatccggagcagcatcgcccacagctccccatcaccgccggggagcaagtcagcgaccccctctccctccagctccactcaggaagaggagtcggaagtgcatttcaagatctcgggagaaaagagaccttcagccgacccaggaaaaaaggccaagaacccgaagaagaagaaaaagaaggaccccaatgagccgcagaagcctgtgtcggcctacgcactcttcttcagagacactcaggccgccatcaagggtcagaaccccagtgccactttcggtgacgtgtccaaaatcgtggcctccatgtgggacagcctgggagaggaacagaagcaggcctacaagaggaagacagaagcagcaaagaaggaatatctgaaggccctggcagcctaccgggctagcctcgtctccaagagctccccagatcaaggtgagaccaagagcactcaggcaaacccaccagccaaaatgctcccacccaagcagcccatgtatgccatgccaggcctggcctccttcctgacgccgtcggacctgcaggccttccgcagtggggcctcccctgccagcctcgcccggacgctgggctccaagtctctgctgccaggcctcagtgcgtccccgccgccgccaccctccttcccgctcagccccacactgcaccagcagctgtcactgccccctcacgcccagggcgccctcctcagtccacctgttagcatgtccccagccccccagccccctgtcctgcccacccccatggcactccaggtgcagctggcgatgagcccctcacctccagggccacaggacttcccgcacatctctgagttccccagcagctcgggatcctgctcacctggcccatccaaccccaccagcagcggggactgggacagcagctaccccagtggggagtgtggcatcagcacctgcagcctgctccccagggacaaatcgctctacctcacctaatcccgcctccctaccatccctgaggctcgctggaaggcactgctcagagcctgaagggctgacagcagaaaagaggccctggccagaggcagggtggcccatcggagagagcagtgacacacccattgcccgggggctgagtctcttcctcaacctcccaccagactctgcagaggcagcccactgcccaccaccagcccaaagaacctgcaggaaccttccgcccgctgacctgcttgctccagggtaactgtggaccctgtcctcgccctgcgcacggtaccctatgtctggacacccggccccagctccagccccagcccaggtgggccgcccctggcggggtcgcttaccaacggacacccaccccagatgcatgggccagagggccggcccccggcatagatgtgcacatcggttttccagtgtgaacaaaagattacgaaacctagaaactgttggttccgtgtaagtagttgactacgtgttttagaactgtgctgaagacatctgtaagactattttgtgggggaaaaaagtagtttcctttaaggtaaaaagcattttatatgatccttagcacatttttaagttttatcttaagggagacgcgcacaaaagcggctgccaaaccgtttcgtcatcctcacagcaaggaccggacgcttgctagccaccccggagcactgctctccttttaatcatgtattcatctattttaaattgccggcgacgacttttgtctatttatgaagaaaccttgagaacgaagttacagcttatcctaccgtgtgtgtggttttggggtttcgtttgggtttgggttcttgacgtcgtttgcagctgtttcctggccctggcgagtgtctgtcttggtgcccagtgcttctctcaaatctctttataataaaacttctgaaaagctgaaaaaaaaaaaaaaaaaa

SEQ ID NO: 2008 - protein, 526 aa, Homo sapiens
MDVRFYPPPAQPAAAPDAPCLGPSPCLDPYYCNKFDGENMYMSMTEPSQDYVPASQSYPGPSLESEDFNIPPITPPSLPDHSLVHLNEVESGYHSLCHPMNHNGLLPFHPQNMDLPEITVSNMLGQDGTLLSNSISVMPDIRNPEGTQYSSHPQMAAMRPRGQPADIRQQPGMMPHGQLTTINQSQLSAQLGLNMGGSNVPHNSPSPPGSKSATPSPSSSVHEDEGDDTSKINGGEKRPASDMGKKPKTPKKKKKKDPNEPQKPVSAYALFFRDTQAAIKGQNPNATFGEVSKIVASMWDGLGEEQKQVYKKKTEAAKKEYLKQLAAYRASLVSKSYSEPVDVKTSQPPQLINSKPSVFHGPSQAHSALYLSSHYHQQPGMNPHLTAMHPSLPRNIAPKPNNQMPVTVSIANMAVSPPPPLQISPPLHQHLNMQQHQPLTMQQPLGNQLPMQVQSALHSPTMQQGFTLQPDYQTIINPTSTAAQVVTQAMEYVRSGCRNPPPQPVDWNNDYCSSGGMQRDKALYLT

SEQ ID NO: 2009 - DNA, 4076 bp, Homo sapiens
ctcttcttcttaaacaaaccacaaacggatgtgagggaaggaaggtgtttcttttactcctgagcccagacacctcactctgttccgtctaagcttgttttgctgaacacttttttttaaaaaaggaaaaagaaaaggagttgcttgatgtgagagtgaaatggacgtaagattttatccacctccagcccagcccgccgctgcgcccgacgctccctgtctgggaccttctccctgcctggacccctactattgcaacaagtttgacggtgagaacatgtatatgagcatgacagagccgagccaggactatgtgccagccagccagtcctaccctggtccaagcctggaaagtgaagacttcaacattccaccaattactcctccttccctcccagaccactcgctggtgcacctgaatgaagttgagtctggttaccattctctgtgtcaccccatgaaccataatggcctgctaccatttcatccacaaaacatggacctccctgaaatcacagtctccaatatgctgggccaggatggaacactgctttctaattccatttctgtgatgccagatatacgaaacccagaaggaactcagtacagttcccatcctcagatggcagccatgagaccaaggggccagcctgcagacatcaggcagcagccaggaatgatgccacatggccagctgactaccattaaccagtcacagctaagtgctcaacttggtttgaatatgggaggaagcaatgttccccacaactcaccatctccacctggaagcaagtctgcaactccttcaccatccagttcagtgcatgaagatgaaggcgatgatacctctaagatcaatggtggagagaagcggcctgcctctgatatggggaaaaaaccaaaaactcccaaaaagaagaagaagaaggatcccaatgagccccagaagcctgtgtctgcctatgcgttattctttcgtgatactcaggccgccatcaagggccaaaatccaaacgctacctttggcgaagtctctaaaattgtggcttcaatgtgggacggtttaggagaagagcaaaaacaggtctataaaaagaaaaccgaggctgcgaagaaggagtacctgaagcaactcgcagcatacagagccagccttgtatccaagagctacagtgaacctgttgacgtgaagacatctcaacctcctcagctgatcaattcgaagccgtcggtgttccatgggcccagccaggcccactcggccctgtacctaagttcccactatcaccaacaaccgggaatgaatcctcacctaactgccatgcatcctagtctccccaggaacatagcccccaagccgaataaccaaatgccagtgactgtctctatagcaaacatggctgtgtcccctcctcctcccctccagatcagcccgcctcttcaccagcatctcaacatgcagcagcaccagccgctcaccatgcagcagccccttgggaaccagctccccatgcaggtccagtctgccttacactcacccaccatgcagcaaggatttactcttcaacccgactatcagactattatcaatcctacatctacagctgcacaagttgtcacccaggcaatggagtatgtgcgttcggggtgcagaaatcctcccccacaaccggtggactggaataacgactactgcagtagtgggggcatgcagagggacaaagcactgtaccttacttgagaatctgaacacctcttctttccactgaggaattcagggaagtgttttcaccatggattgctttgtacagtcaaggcagttctccattttattagaaaatacaagttgctaagcacttaggaccatttgagcttgtgggtcacccactctggaagaaatagtcatgcttctttattatttttttaatcctttatggacattgtttttcttcttccctgaaggaaatttggaccattcagattttatgttggttttttgctgtgaagtgctgcgctctagtaactgccttagcaactgtagatgtctcggataaaagtcctggattttccattggttttcataatgggtgtttatatgaaactactaaagactttttaaatggcttgatgtagcagtcatagcaagtttgtaaatagcatctatgttacactctcctagagtataaaatgtgaatgtttttgtagctaaattgtaattgaaactggctcattccagtttattgatttcacaataggggttaaattggcaaacattcatatttttacttcatttttaaaacaactgactgatagttctatattttcaaaatatttgaaaataaaaagtattcccaagtgattttaatttaaaaacaaattggctttgtctcattgatcagacaaaaagaaactagtattaagggaagcgcaaacacatttattttgtactgcagaaaaattgcttttttgtatcactttttgtgtaatggttagtaaatgtcatttaagtccttttatgtataaaactgccaaatgcttacctggtattttattagatgcagaaacagattggaaacagctaaattacaacttttacatatggctctgtcttattgtttcttcatactgtgtctgtatttaatctttttttatggaacctgttgcgcctatttatgaaataataaatataggtgtttgtaagtaaatttgttagtatttgaaagaggtttctttgatgttttaacttttgctggcaaaaaaaaattcacgcttggtgtgaatactttattatttagtttttacagtaacatgaataaagccaaacctgcttttcatttagcagcaaattaaagtaaccagtccttatttctgcatttctttggttgatgcaaacaaaaaactattatatttaagaactttatttcttcatacgacataacagaattgccctccaagtcacacaagctccaagactaaacaaacagacaggtcctctgtcttaaaaaggttacttcttggttctcagctggttctagtcaattctgaaccaccaccccccgccccccgcaaaaaagtaaaagtcaaaccaaacttcctcaagctgcatgcttttcacaaaatccagaaagcatttaagaattgaactaggggctggaagaagtgaaagggaagcatctaaaaatgaaaggtgagtaaccagatagcaaaagaaaagggaaagccatccaaatttgaaagctgttgatagaaattgagattcttgctgtcttttgtgcctctacaagctactactcattccagaattcctgggtcttccaagaggattcttaaggtaccagagatttgctagggaaccaaaagtgcttgagaatctgcctgagggcttgcatagctttcacattaaaaaaagaaaaagctagcagatttactcctttttaggggatcatatcaagaaagttagtctggttggaaaccaagagaatggctgatgtctctttcttggaatatgtgaaataaatttagcagtttaactaaatacaaatatatgcattgtgtaatccactcagaattaaacagacaaaaggtatgcttgctttggaatgattttaggcattgtacaaccttgaatcacttgagcatgtaataactaataaataatgcagatccatgtgattattaaaatgactgtagctgagagctctaattttcctgtcttgaaactgtataagaactcatgtgattaagttcacagtttattgtttgtctgtttagtattttagaaatataccagcactactaattaactaatgtcttttatttattatattatgataaagtaaaaatttcacttgcattaagtctaaactgagaaggtaattactgggaggagaatgagcagctttgactttgacaggcggtttgtgcaggaaagcacagtgccgtgttgtttacagcttttctagagcagctgtgcgaccagggtagagagtgttgaaattcaataccaaatacagtaaaaacaaatgtaaataaaagaaaacacatcatcaataaaactgttattatgcgtgaccgta

SEQ ID NO: 2010 - protein, 576 aa, Homo sapiens
MDVRFYPAAAGDPASLDFAQCLGYYGYSKFGNNNNYMNMAEANNAFFAASEQTFHTPSLGDEEFEIPPITPPPESDPALGMPDVLLPFQALSDPLPSQGSEFTPQFPPQSLDLPSITISRNLVEQDGVLHSSGLHMDQSHTQVSQYRQDPSLIMRSIVHMTDAARSGVMPPAQLTTINQSQLSAQLGLNLGGASMPHTSPSPPASKSATPSPSSSINEEDADEANRAIGEKRAAPDSGKKPKTPKKKKKKDPNEPQKPVSAYALFFRDTQAAIKGQNPNATFGEVSKIVASMWDSLGEEQKQVYKRKTEAAKKEYLKALAAYRASLVSKAAAESAEAQTIRSVQQTLASTNLTSSLLLNTPLSQHGTVSASPQTLQQSLPRSIAPKPLTMRLPMNQIVTSVTIAANMPSNIGAPLISSMGTTMVGSAPSTQVSPSVQTQQHQMQLQQQQQQQQQQMQQMQQQQLQQHQMHQQIQQQMQQQHFQHHMQQHLQQQQQHLQQQINQQQLQQQLQQRLQLQQLQHMQHQSQPSPRQHSPVASQITSPIPAIGSPQPASQQHQSQIQSQTQTQVLSQVSIF

SEQ ID NO: 2011 - protein, 571 aa, Homo sapiens
MKCQPRSGARRIEERLHYLITTYLKFGNNNNYMNMAEANNAFFAASETFHTPSLGDEEFEIPPITPPPESDPALGMPDVLLPFQALSDPLPSQGSEFTPQFPPQSLDLPSITISRNLVEQDGVLHSSGLHMDQSHTQVSQYRQDPSLIMRSIVHMTDAARSGVMPPAQLTTINQSQLSAQLGLNLGGASMPHTSPSPPASKSATPSPSSSINEEDADEANRAIGEKRAAPDSGKKPKTPKKKKKKDPNEPQKPVSAYALFFRDTQAAIKGQNPNATFGEVSKIVASMWDSLGEEQKQVYKRKTEAAKKEYLKALAAYRASLVSKAAAESAEAQTIRSVQQTLASTNLTSSLLLNTPLSQHGTVSASPQTLQQSLPRSIAPKPLTMRLPMNQIVTSVTIAANMPSNIGAPLISSMGTTMVGSAPSTQVSPSVQTQQHQMQLQQQQQQQQQQMQQMQQQQLQQHQMHQQIQQQMQQQHFQHHMQQHLQQQQQHLQQQINQQQLQQQLQQRLQLQQLQHMQHQSQPSPRQHSPVASQITSPIPAIGSPQPASQQHQSQIQSQTQTQVLSQVSIF

SEQ ID NO: 2012 - DNA, 4959 bp, Homo sapiens
gtctccgcggctcgtctcctcagtccgcccggggaggaggaggaggagcggggccagccgccgccgccgccgccgtcccagcctcgcccagcgcacctgaactcgcctcgccgacccgggccccagcgccgcgccccgcgcccccggcgcccggcccgcgcgcagcgctgcctcggtgccccggcggggcgcgtccccccggccgcctcccgctctcccgcggctcgcgtggccgcgcctttgtgtgcggcggccgcggctcccgagctcctcgggctctgggtcccggcgcccctccggccgcgagtcccacgcgccacccccgggcgccctcgacggtggatctagcggcggcgaggaggcgggtcccggccccggcgaaccccagtcccggcccccggccccgggcccagcttcggcatggatgtgaggttctaccccgcggcggccggggaccctgccagcctggacttcgcgcagtgcctggggtactacggctacagcaagtttggaaataataataactatatgaatatggctgaggcgaacaatgcgttcttcgctgccagtgagcagacattccacacaccaagccttggggacgaggaattcgaaattccaccaatcacgcctcctccagagtcagaccctgccctaggcatgccggatgtactgctaccctttcaagccctcagcgatccattgccttcccagggaagtgaattcacaccccagtttccccctcaaagcctggacctcccttccattacaatctcaagaaatctcgtggaacaagatggcgtgcttcatagcagtgggttgcatatggatcagagccacacacaagtgtcccagtaccggcaggatccctccctgatcatgcggtccatcgtccacatgaccgatgctgcgcgttctggggtcatgcctcctgcccagctcaccaccatcaaccagtctcagctcagcgcccagttggggttgaatttgggaggtgccagtatgcctcacacatctccttcacctccagcaagcaaatcagccactccctccccttccagctccatcaatgaagaggatgctgatgaagccaacagagccattggagagaaaagagctgctccagactctggcaagaagcccaagactccaaagaaaaagaaaaagaaagatcccaatgagccacagaagccagtgtcagcatatgccctgtttttcagagacacacaggctgcaattaaaggtcaaaaccccaatgcaacctttggagaggtctcaaaaattgtagcatctatgtgggacagccttggagaagaacaaaagcaggtatataaaaggaaaacagaagctgccaaaaaagaatacctgaaggccctggcggcatacagggccagcctcgtttctaaggctgctgctgagtcagcagaagcccagaccatccgttctgttcagcagaccctggcgtcgaccaatctaacatcctctctccttctcaacactccactgtctcaacatggaacagtgtcagcatcacctcagactctccagcaatccctccctaggtcaatcgctcccaaacccttaaccatgagactccccatgaaccagattgtcacatcagtcaccattgcagccaacatgccctcgaacattggggctccactgataagctccatgggaacgaccatggttggctcagcaccctccacccaagtgagtccttcggtgcaaacccagcagcatcagatgcaattgcagcagcagcagcagcagcaacaacaacagatgcaacagatgcagcagcagcaactccagcagcaccaaatgcatcagcaaatccagcagcagatgcagcagcagcatttccagcaccacatgcagcagcacctgcagcagcagcagcagcatctccagcagcaaattaatcaacagcagctgcagcagcagctgcagcagcgcctccagctgcagcagctgcaacacatgcagcaccagtctcagccttctcctcggcagcactcccctgtcgcctctcagataacatcccccatccctgccatcgggagcccccagccagcctctcagcagcaccagtcgcaaatacagtctcagacacagactcaagtattatcgcaggtcagtattttctgaagacgcatatggcagacggatttgcgtataccaaggagagtggcataggagggaaaagcatatgtggctgaaacctgtaagttggtgttggttatgcagaaatgtgtaacagatcaaacggtcctctcaagtgtctattagataggcaataagaactgcagtgtagctgagtaacatcttttagctgactataaatcactttgtttttaaacaagaaaagctgtgctcttttatgtgatgccttttttatttattcaggctatacctacaatatgtgaatcaaactgtttaatgaatcctgggacatactgatgactataaactggcctctctgagtcatagaaaaatggccttatttctccagaagtgagtaaaccacacttccaggctatctgaactcctgaagccctaaaaataaaaagcacagttgtaactacctgaaatatgaagatccagtttcatacaaacatttgtatgacgtgaatagttgatggcatttttttgtcatgaaaaaaataatgtaaatcacagacttttgccaaagctcttattttttttcctaaatctctccagaaaaaaaatgcaagtgactaaattcaattattgactaatttccactttttatccatgacttctccaaatcaaaccacagtatatgttgtaacaatatctatgaccactgttagcccattatattcattccaattagaagaaatgtgaatactatattccgtgttttgagtgacaagtttcgaaaaataaaaacactgtatttttaaaagggaaatgcacttaaatgaaaacagttattacaaaagttaagatttaaaaagaaaaagcaagagtttttattatgatgtaataccagtagaatatttaaaaggcacaccacatctgaataatcaatgtaaatattttctttcaaagttgtaagttttcatatcatgtgctgtaaagttttcctaaatgaggctttaacgtaaacactggtgacataaaccattcattgctacgttgcttattgtgtttttatgctgttttatacttttttatgagttatgatagcagcaattaagttgtttgtattttgcttaactaaaacaaaaatgcttttatcttgctatagaataaacacatttcagtaaaaactgtggactgtattttgatgcaacaacaaagaaactgttcacttttcaaataaaatgatatgtcagatttcatttttggttccttgaatacatgtaagatggggaaatatgccacataccaagtttcgttttagcccaaacatcatcttccatttttcaattggaaatatgatatttatggccaagaatatgcattgcatagcctgaaatgaagatccttgaaaaaaccaaaacaacgcattggaaatatttgtgtaattgtcttttttttttttttttttttttttaagatgcaagtacaaggtaagtatagagaaaaaagtaatcgcttttttgagggggctagaactagctgggtattgtaatgttattgcgattaaaatagatggtgaatgctaattcttaagccaaaataattatttcggtgcccatttattccccccttttcttgctctgtagcggttcctctttgagagcagtgtgaccactatccccagttgtcttgcatgattaattacagcatctgtcctgtcagaagctataatgaagaggtcttgataaaaattgcaaattaccactggcaacagtcttaaactgcttatgataaaatgaaaattaaaaacagcaagtgtcaaccctgaccagaatcctaatctggaaagaatgagggtgtgcgtggtgcgctccacagctactatgtgcaagacattcaaaaataatggaatatggatccctcaaagttgttgtatttcagagattatttactgtatgttgtgggttatgaataatgaattcagctttcaatatttcataatcctctcctactctgtattatgtacaaatattgaacagcaagagattctaattataaatttatggatttcttgctgtagaaaaatttatgtctaaattgaagcttttcataagatgtattagttgacaggtatcagtgttcaaacagccttagaatgatgcctaattacatctacaagggagtgattgtattccacaaagaaatgatgtgctagcatcagatccttcagaagtagagctcgaatggtaaaagattttctgtgaattgaaactaacattacataacaataaccattttatattctgttgtgaaacctttagacagatgtcttcaaaattaattgctaaactacatgtgacagtaattgtgtattagttctgtaattgtcattttgaaaacccatgaagtattgcttggaaaaaaatgtcactagtgataagacttaattgcaagtgaagtctgttttcaactgtttgcagttagaagcaggtgttgtaacatctattaaatgattttataaatcttgggttttatcacatttgattaaatgctgctaagccactgatggtcaattccagaggaaaaaaaaagtttaatgactacagtttataaaattaatcaccaggcaaaactacatatttaaaatgtcaaaaggcttgaatcatgaaaagaattcctcaaccttgttaccaaattattgttttcaggattcacaaagcatgttatatatccatttatatttcagtttatacatatgactggtttctattcctgagacttaagtaagtacttggtgcgctttttcttttgttacaggtcagaaataaatcaggataatgaaaaata

SEQ ID NO: 2013 - DNA, 4713 bp, Homo sapiens
gaaccgacacgaggcttcacctgggaagcttcaagtctgcctacctgtgaaaggtcaggccccaacaccccttctgggaaatcctacagctaggatgcatttctctcactgaaccccatccagcagaggacagaagagtcagaagagggtagagaggatttagatactcatagaagatgtagtggaggatgaagtgccaacctcgctcgggagccaggcgcattgaggagagacttcattacctgataactacctatctgaaatttggaaataataataactatatgaatatggctgaggcgaacaatgcgttcttcgctgccagtgagacattccacacaccaagccttggggacgaggaattcgaaattccaccaatcacgcctcctccagagtcagaccctgccctaggcatgccggatgtactgctaccctttcaagccctcagcgatccattgccttcccagggaagtgaattcacaccccagtttccccctcaaagcctggacctcccttccattacaatctcaagaaatctcgtggaacaagatggcgtgcttcatagcagtgggttgcatatggatcagagccacacacaagtgtcccagtaccggcaggatccctccctgatcatgcggtccatcgtccacatgaccgatgctgcgcgttctggggtcatgcctcctgcccagctcaccaccatcaaccagtctcagctcagcgcccagttggggttgaatttgggaggtgccagtatgcctcacacatctccttcacctccagcaagcaaatcagccactccctccccttccagctccatcaatgaagaggatgctgatgaagccaacagagccattggagagaaaagagctgctccagactctggcaagaagcccaagactccaaagaaaaagaaaaagaaagatcccaatgagccacagaagccagtgtcagcatatgccctgtttttcagagacacacaggctgcaattaaaggtcaaaaccccaatgcaacctttggagaggtctcaaaaattgtagcatctatgtgggacagccttggagaagaacaaaagcaggtatataaaaggaaaacagaagctgccaaaaaagaatacctgaaggccctggcggcatacagggccagcctcgtttctaaggctgctgctgagtcagcagaagcccagaccatccgttctgttcagcagaccctggcgtcgaccaatctaacatcctctctccttctcaacactccactgtctcaacatggaacagtgtcagcatcacctcagactctccagcaatccctccctaggtcaatcgctcccaaacccttaaccatgagactccccatgaaccagattgtcacatcagtcaccattgcagccaacatgccctcgaacattggggctccactgataagctccatgggaacgaccatggttggctcagcaccctccacccaagtgagtccttcggtgcaaacccagcagcatcagatgcaattgcagcagcagcagcagcagcaacaacaacagatgcaacagatgcagcagcagcaactccagcagcaccaaatgcatcagcaaatccagcagcagatgcagcagcagcatttccagcaccacatgcagcagcacctgcagcagcagcagcagcatctccagcagcaaattaatcaacagcagctgcagcagcagctgcagcagcgcctccagctgcagcagctgcaacacatgcagcaccagtctcagccttctcctcggcagcactcccctgtcgcctctcagataacatcccccatccctgccatcgggagcccccagccagcctctcagcagcaccagtcgcaaatacagtctcagacacagactcaagtattatcgcaggtcagtattttctgaagacgcatatggcagacggatttgcgtataccaaggagagtggcataggagggaaaagcatatgtggctgaaacctgtaagttggtgttggttatgcagaaatgtgtaacagatcaaacggtcctctcaagtgtctattagataggcaataagaactgcagtgtagctgagtaacatcttttagctgactataaatcactttgtttttaaacaagaaaagctgtgctcttttatgtgatgccttttttatttattcaggctatacctacaatatgtgaatcaaactgtttaatgaatcctgggacatactgatgactataaactggcctctctgagtcatagaaaaatggccttatttctccagaagtgagtaaaccacacttccaggctatctgaactcctgaagccctaaaaataaaaagcacagttgtaactacctgaaatatgaagatccagtttcatacaaacatttgtatgacgtgaatagttgatggcatttttttgtcatgaaaaaaataatgtaaatcacagacttttgccaaagctcttattttttttcctaaatctctccagaaaaaaaatgcaagtgactaaattcaattattgactaatttccactttttatccatgacttctccaaatcaaaccacagtatatgttgtaacaatatctatgaccactgttagcccattatattcattccaattagaagaaatgtgaatactatattccgtgttttgagtgacaagtttcgaaaaataaaaacactgtatttttaaaagggaaatgcacttaaatgaaaacagttattacaaaagttaagatttaaaaagaaaaagcaagagtttttattatgatgtaataccagtagaatatttaaaaggcacaccacatctgaataatcaatgtaaatattttctttcaaagttgtaagttttcatatcatgtgctgtaaagttttcctaaatgaggctttaacgtaaacactggtgacataaaccattcattgctacgttgcttattgtgtttttatgctgttttatacttttttatgagttatgatagcagcaattaagttgtttgtattttgcttaactaaaacaaaaatgcttttatcttgctatagaataaacacatttcagtaaaaactgtggactgtattttgatgcaacaacaaagaaactgttcacttttcaaataaaatgatatgtcagatttcatttttggttccttgaatacatgtaagatggggaaatatgccacataccaagtttcgttttagcccaaacatcatcttccatttttcaattggaaatatgatatttatggccaagaatatgcattgcatagcctgaaatgaagatccttgaaaaaaccaaaacaacgcattggaaatatttgtgtaattgtcttttttttttttttttttttttttaagatgcaagtacaaggtaagtatagagaaaaaagtaatcgcttttttgagggggctagaactagctgggtattgtaatgttattgcgattaaaatagatggtgaatgctaattcttaagccaaaataattatttcggtgcccatttattccccccttttcttgctctgtagcggttcctctttgagagcagtgtgaccactatccccagttgtcttgcatgattaattacagcatctgtcctgtcagaagctataatgaagaggtcttgataaaaattgcaaattaccactggcaacagtcttaaactgcttatgataaaatgaaaattaaaaacagcaagtgtcaaccctgaccagaatcctaatctggaaagaatgagggtgtgcgtggtgcgctccacagctactatgtgcaagacattcaaaaataatggaatatggatccctcaaagttgttgtatttcagagattatttactgtatgttgtgggttatgaataatgaattcagctttcaatatttcataatcctctcctactctgtattatgtacaaatattgaacagcaagagattctaattataaatttatggatttcttgctgtagaaaaatttatgtctaaattgaagcttttcataagatgtattagttgacaggtatcagtgttcaaacagccttagaatgatgcctaattacatctacaagggagtgattgtattccacaaagaaatgatgtgctagcatcagatccttcagaagtagagctcgaatggtaaaagattttctgtgaattgaaactaacattacataacaataaccattttatattctgttgtgaaacctttagacagatgtcttcaaaattaattgctaaactacatgtgacagtaattgtgtattagttctgtaattgtcattttgaaaacccatgaagtattgcttggaaaaaaatgtcactagtgataagacttaattgcaagtgaagtctgttttcaactgtttgcagttagaagcaggtgttgtaacatctattaaatgattttataaatcttgggttttatcacatttgattaaatgctgctaagccactgatggtcaattccagaggaaaaaaaaagtttaatgactacagtttataaaattaatcaccaggcaaaactacatatttaaaatgtcaaaaggcttgaatcatgaaaagaattcctcaaccttgttaccaaattattgttttcaggattcacaaagcatgttatatatccatttatatttcagtttatacatatgactggtttctattcctgagacttaagtaagtacttggtgcgctttttcttttgttacaggtcagaaataaatcaggataatgaaaaatag

SEQ ID NO: 2014 - protein, 598 aa, Homo sapiens
METFHTPSLGDEEFEIPPISLDSDPSLAVSDVVGHFDDLADPSSSQDGSFSAQYGVQTLDMPVGMTHGLMEQGGGLLSGGLTMDLDHSIGTQYSANPPVTIDVPMTDMTSGLMGHSQLTTIDQSELSSQLGLSLGGGTILPPAQSPEDRLSTTPSPTSSLHEDGVEDFRRQLPSQKTVVVEAGKKQKAPKKRKKKDPNEPQKPVSAYALFFRDTQAAIKGQNPNATFGEVSKIVASMWDSLGEEQKQVYKRKTEAAKKEYLKALAAYKDNQECQATVETVELDPAPPSQTPSPPPMATVDPASPAPASIEPPALSPSIVVNSTLSSYVANQASSGAGGQPNITKLIITKQMLPSSITMSQGGMVTVIPATVVTSRGLQLGQTSTATIQPSQQAQIVTRSVLQAAAAAAAAASMQLPPPRLQPPPLQQMPQPPTQQQVTILQQPPPLQAMQQPPPQKVRINLQQQPPPLQIKSVPLPTLKMQTTLVPPTVESSPERPMNNSPEAHTVEAPSPETICEMITDVVPEVESPSQMDVELVSGSPVALSPQPRCVRSGCENPPIVSKDWDNEYCSNECVVKHCRDVFLAWVASRNSNTVVFVK

SEQ ID NO: 2015 - protein, 621 aa, Homo sapiens
MEFPGGNDNYLTITGPSHPFLSGAETFHTPSLGDEEFEIPPISLDSDPSLAVSDVVGHFDDLADPSSSQDGSFSAQYGVQTLDMPVGMTHGLMEQGGGLLSGGLTMDLDHSIGTQYSANPPVTIDVPMTDMTSGLMGHSQLTTIDQSELSSQLGLSLGGGTILPPAQSPEDRLSTTPSPTSSLHEDGVEDFRRQLPSQKTVVVEAGKKQKAPKKRKKKDPNEPQKPVSAYALFFRDTQAAIKGQNPNATFGEVSKIVASMWDSLGEEQKQVYKRKTEAAKKEYLKALAAYKDNQECQATVETVELDPAPPSQTPSPPPMATVDPASPAPASIEPPALSPSIVVNSTLSSYVANQASSGAGGQPNITKLIITKQMLPSSITMSQGGMVTVIPATVVTSRGLQLGQTSTATIQPSQQAQIVTRSVLQAAAAAAAAASMQLPPPRLQPPPLQQMPQPPTQQQVTILQQPPPLQAMQQPPPQKVRINLQQQPPPLQIKSVPLPTLKMQTTLVPPTVESSPERPMNNSPEAHTVEAPSPETICEMITDVVPEVESPSQMDVELVSGSPVALSPQPRCVRSGCENPPIVSKDWDNEYCSNECVVKHCRDVFLAWVASRNSNTVVFVK

SEQ ID NO: 2016 - DNA, 4476 bp, Homo sapiens
agcagagagaacacacgtccttgcggaagtgacggcagttccgagtccagtgggggcggtgggagcgatgagggtctgagacggtgggagcggttgtgtgaagatggagacattccatacaccaagcttgggtgatgaggaatttgaaatcccacctatctccttggattctgatccctcattggctgtctcagatgtggttggccactttgatgacctggcagacccttcctcttcacaggatggcagtttttcagcccagtatggggtccagacattggacatgcctgtgggcatgacccatggcttgatggagcagggcggggggctcctgagtgggggcttgaccatggacttggaccactctataggaactcagtatagtgccaacccacctgttacaattgatgtaccaatgacagacatgacatctggcttgatggggcatagccagttgaccaccattgatcagtcagaactgagttcccagctgggtttgagcctagggggtggcaccatcctgccacctgcccagtcacctgaagatcgtctttcaaccaccccttcacctactagttcacttcacgaggatggtgttgaggatttccggaggcaacttcccagccagaagacagtcgtggtggaagcagggaaaaagcagaaggccccaaagaagagaaaaaagaaagatcctaatgaacctcagaaaccagtttcagcatatgctttattctttcgtgatacacaggctgccatcaagggacagaatcctaatgccacttttggtgaggtttcaaaaattgtggcctccatgtgggatagtcttggagaggagcaaaaacaggtatataagaggaaaactgaggctgccaagaaagagtatctgaaggcactggctgcttacaaagacaaccaggagtgtcaggccactgtggaaacagtggaattggatccagcaccaccatcacaaactccttctccacctcctatggctactgttgacccagcatctccagcaccagcttcaatagagccccctgccctgtccccatccattgttgttaactccaccctttcatcctatgtggcaaaccaggcatcttctggagctgggggtcagcccaatatcaccaagttgattattaccaaacaaatgttgccctcttctattactatgtctcaaggagggatggttactgttatcccagccacagtggtgacctcccgggggctccaactaggccaaaccagtacagctactatccagcccagtcaacaagcccagattgtcactcggtcagtgttgcaggcagcagcagctgctgctgctgctgcttctatgcaactgcctccaccccgactacagccccctccattacaacagatgccacagcccccgactcagcagcaagttaccattctgcagcagcctcctccactccaggccatgcaacagcctccacctcagaaagttcgaatcaatttacagcaacagcctcctcctctgcagatcaagagtgtgcctctacccactttgaaaatgcagactaccttagtcccaccaactgtggaaagtagtcctgagcggcctatgaacaacagccctgaggcccatacagtggaggcaccttctcctgagactatctgtgagatgatcacagatgtagttcctgaggttgagtctccttctcagatggatgttgaattggtgagtgggtctcctgtggcactctcaccccagcctcgatgtgtgaggtctggttgtgagaaccctcccattgtgagtaaggactgggacaatgaatactgcagcaatgagtgtgtggtgaagcactgcagggatgtattcttggcctgggtagcctctagaaattcaaacacagtggtgtttgtgaaatagtccttcctgttctccaagccagtgaagagttatctgctgggaaagtgtccaagagcctgtttttgaaacacaagctgggcttctggtagtgcctcatcacaacccatgatggctgttcatgtttcaccccttttcttccttcagcagaggccaggctatggagcagggccactgaatttgctgtaatctggagatgctttttactttcaaccataagcggtaatagcagaggaaagggtgaagggagtctgggcaagcaaagcatagagatggtggggtggtggtggggttgaagaaacttgttggtataattgtcataggacttgcctaaaatattattaaaattacgggagtgtactcagctttgagcctaggagaaaatgccactgtgtgcatccattttaaagggttccctcataaaaaaatgttattccccattatcacatcagtacactgctttgaaaacaaaacttttcaacatgggcatactgggctacatggaaaatgacatcacccaggagtgatttctctttatatatattatttctgcagttaccatccttatctgagttatcacagttcatgaatctaagaggcggaactctacatcattagtaagaggttccaccaaagtctaaagttgtattcacttgtgtttgatgaactatctttaaaagaccataggtctatcattatttcttagacataatctaaagaaaaacagactagagaagccacctggttgtaacagaataagcagaagtttacagcatgatagtccaagtggtgataactttaaataaaactcaaatttttactgtttgtagacaggaatgctgtcctagagaacctcctcctcaaccagctacgtacatagttttatcctatgcattcctgttttctgtgtgttttttgttttttttttttttttttttttttgagacagagtctcgctctgtcacccaggctggagtgcagtggtgcgacctcagctcactgaaacctctgcctcccgggttcaagcgattctcctgcatcagcctcccgagtagctaggattacaggcgcccgccactacgcccagctaatttgtggtatttttagtagagacagggtttcaccatgttggccaggctggtctcgaactcctgacctcatgatccgcccgccttgacctcccaaagtgctgggattacaggcatgagccaccgcacccagcctgcattcctgtttttttaatggttttggagggtagcagtagagatggggtctcactatgttgcccagtctagtcttgaactcctgggctacagttaccctcctacctcggcttcccaaagtgctcggattacaggtgtgagccactgtgcctagcctataatgatcattttaatgtttcccatgcactcatttagtttgaaccttcacagcaacccaatgaggtaatactcccatttcacatataatactgagagatgagttgcacaagattatacactgttaagtagcagagccagaatggacttcagaatcccaactacaatacaaatgtttatttaaataaagaagaaagctattgtacaaatatcactcttcaggtttagcttacagagccatggctatggattcttagctctgtaaggaagtgcttctataaattcttaggtttagagatgataccatctgggtacctttgcttgaaccgtgcaaccacatctgggtctagtaggtggatcccatccagttggtttccaagggtgatcctgaaacagtgtaaaaggaggggcaaaccagaaatcctggaattagagggtttaatattgttaaaaaatgcataccaaatgaagactgcctatcatcatatcaaatatgccaattctaaaaagagcttaacattagaatagtatatggtagaattactagttcagaattggcatagattctggtgttaaaatagactggatctgtattatctgagggttagtaactaatgcttagccaggcctgcttcacagagttgctaccagggagtattctttggataagcaaaatgctagcagcatgtgttttaagctctgttaaggggtgaaagatgtaattattgacagattaaatagataacttcgtaaccaccagggggcagattcaatacatcacagaatggctgaggaagatccttgggttgtgaagagagtagaaaccctagggagcagtgcttttgggtcctagaacctgttgagtttctaatgaatatttgtagaatctcataaaacagtttaaatacaagcttaagtggcttatgaatcctgtgaagctcatttatggactagtgtaaaacaatgtgaagctctactaagttctgtccttaatcataaataatagccccttgaggactagcctgttctctggtcaccttaccagttgggttgcacattgtgtggtcgtccaaataactcaatcttgcgagtgccaggagatagtctttcaatcatgccatagatttcatctggtttatgactggtggaacgaacctaggaaataaaaactagctgctttttaagttacacaagaaaaaa

SEQ ID NO: 2017 - DNA, 4514 bp, Homo sapiens
cttgcggaagtgacggcagttccgagtccagtgggggcggtgggagcgatgagggtctgagacggtgggagcggttgtgtgaagatggagtttcccggaggaaatgacaattacctgacgatcacagggccttcgcaccccttcctgtcaggggccgagacattccatacaccaagcttgggtgatgaggaatttgaaatcccacctatctccttggattctgatccctcattggctgtctcagatgtggttggccactttgatgacctggcagacccttcctcttcacaggatggcagtttttcagcccagtatggggtccagacattggacatgcctgtgggcatgacccatggcttgatggagcagggcggggggctcctgagtgggggcttgaccatggacttggaccactctataggaactcagtatagtgccaacccacctgttacaattgatgtaccaatgacagacatgacatctggcttgatggggcatagccagttgaccaccattgatcagtcagaactgagttcccagctgggtttgagcctagggggtggcaccatcctgccacctgcccagtcacctgaagatcgtctttcaaccaccccttcacctactagttcacttcacgaggatggtgttgaggatttccggaggcaacttcccagccagaagacagtcgtggtggaagcagggaaaaagcagaaggccccaaagaagagaaaaaagaaagatcctaatgaacctcagaaaccagtttcagcatatgctttattctttcgtgatacacaggctgccatcaagggacagaatcctaatgccacttttggtgaggtttcaaaaattgtggcctccatgtgggatagtcttggagaggagcaaaaacaggtatataagaggaaaactgaggctgccaagaaagagtatctgaaggcactggctgcttacaaagacaaccaggagtgtcaggccactgtggaaacagtggaattggatccagcaccaccatcacaaactccttctccacctcctatggctactgttgacccagcatctccagcaccagcttcaatagagccccctgccctgtccccatccattgttgttaactccaccctttcatcctatgtggcaaaccaggcatcttctggagctgggggtcagcccaatatcaccaagttgattattaccaaacaaatgttgccctcttctattactatgtctcaaggagggatggttactgttatcccagccacagtggtgacctcccgggggctccaactaggccaaaccagtacagctactatccagcccagtcaacaagcccagattgtcactcggtcagtgttgcaggcagcagcagctgctgctgctgctgcttctatgcaactgcctccaccccgactacagccccctccattacaacagatgccacagcccccgactcagcagcaagttaccattctgcagcagcctcctccactccaggccatgcaacagcctccacctcagaaagttcgaatcaatttacagcaacagcctcctcctctgcagatcaagagtgtgcctctacccactttgaaaatgcagactaccttagtcccaccaactgtggaaagtagtcctgagcggcctatgaacaacagccctgaggcccatacagtggaggcaccttctcctgagactatctgtgagatgatcacagatgtagttcctgaggttgagtctccttctcagatggatgttgaattggtgagtgggtctcctgtggcactctcaccccagcctcgatgtgtgaggtctggttgtgagaaccctcccattgtgagtaaggactgggacaatgaatactgcagcaatgagtgtgtggtgaagcactgcagggatgtattcttggcctgggtagcctctagaaattcaaacacagtggtgtttgtgaaatagtccttcctgttctccaagccagtgaagagttatctgctgggaaagtgtccaagagcctgtttttgaaacacaagctgggcttctggtagtgcctcatcacaacccatgatggctgttcatgtttcaccccttttcttccttcagcagaggccaggctatggagcagggccactgaatttgctgtaatctggagatgctttttactttcaaccataagcggtaatagcagaggaaagggtgaagggagtctgggcaagcaaagcatagagatggtggggtggtggtggggttgaagaaacttgttggtataattgtcataggacttgcctaaaatattattaaaattacgggagtgtactcagctttgagcctaggagaaaatgccactgtgtgcatccattttaaagggttccctcataaaaaaatgttattccccattatcacatcagtacactgctttgaaaacaaaacttttcaacatgggcatactgggctacatggaaaatgacatcacccaggagtgatttctctttatatatattatttctgcagttaccatccttatctgagttatcacagttcatgaatctaagaggcggaactctacatcattagtaagaggttccaccaaagtctaaagttgtattcacttgtgtttgatgaactatctttaaaagaccataggtctatcattatttcttagacataatctaaagaaaaacagactagagaagccacctggttgtaacagaataagcagaagtttacagcatgatagtccaagtggtgataactttaaataaaactcaaatttttactgtttgtagacaggaatgctgtcctagagaacctcctcctcaaccagctacgtacatagttttatcctatgcattcctgttttctgtgtgttttttgttttttttttttttttttttttttgagacagagtctcgctctgtcacccaggctggagtgcagtggtgcgacctcagctcactgaaacctctgcctcccgggttcaagcgattctcctgcatcagcctcccgagtagctaggattacaggcgcccgccactacgcccagctaatttgtggtatttttagtagagacagggtttcaccatgttggccaggctggtctcgaactcctgacctcatgatccgcccgccttgacctcccaaagtgctgggattacaggcatgagccaccgcacccagcctgcattcctgtttttttaatggttttggagggtagcagtagagatggggtctcactatgttgcccagtctagtcttgaactcctgggctacagttaccctcctacctcggcttcccaaagtgctcggattacaggtgtgagccactgtgcctagcctataatgatcattttaatgtttcccatgcactcatttagtttgaaccttcacagcaacccaatgaggtaatactcccatttcacatataatactgagagatgagttgcacaagattatacactgttaagtagcagagccagaatggacttcagaatcccaactacaatacaaatgtttatttaaataaagaagaaagctattgtacaaatatcactcttcaggtttagcttacagagccatggctatggattcttagctctgtaaggaagtgcttctataaattcttaggtttagagatgataccatctgggtacctttgcttgaaccgtgcaaccacatctgggtctagtaggtggatcccatccagttggtttccaagggtgatcctgaaacagtgtaaaaggaggggcaaaccagaaatcctggaattagagggtttaatattgttaaaaaatgcataccaaatgaagactgcctatcatcatatcaaatatgccaattctaaaaagagcttaacattagaatagtatatggtagaattactagttcagaattggcatagattctggtgttaaaatagactggatctgtattatctgagggttagtaactaatgcttagccaggcctgcttcacagagttgctaccagggagtattctttggataagcaaaatgctagcagcatgtgttttaagctctgttaaggggtgaaagatgtaattattgacagattaaatagataacttcgtaaccaccagggggcagattcaatacatcacagaatggctgaggaagatccttgggttgtgaagagagtagaaaccctagggagcagtgcttttgggtcctagaacctgttgagtttctaatgaatatttgtagaatctcataaaacagtttaaatacaagcttaagtggcttatgaatcctgtgaagctcatttatggactagtgtaaaacaatgtgaagctctactaagttctgtccttaatcataaataatagccccttgaggactagcctgttctctggtcaccttaccagttgggttgcacattgtgtggtcgtccaaataactcaatcttgcgagtgccaggagatagtctttcaatcatgccatagatttcatctggtttatgactggtggaacgaacctaggaaataaaaactagctgctttttaagtta

SEQ ID NO: 2018 - DNA, 723 bp, Artificial Sequence
  source: /note="Description of Artificial Sequence: Synthetic polynucleotide"
gaggtgcagttggtcgaaagcgggggcgggcttgtgcagcctggcggatcactgcggctgtcctgcgcggcatcaggcttcacgttttcttcctacgccatgtcctgggtgcgccaggcccctggaaagggactggaatgggtgtccgcgatttcggggtccggcgggagcacctactacgccgattccgtgaagggccgcttcactatctcgcgggacaactccaagaacaccctctacctccaaatgaatagcctgcgggccgaggataccgccgtctactattgcgctaaggtcgtgcgcgacggaatggacgtgtggggacagggtaccaccgtgacagtgtcctcggggggaggcggtagcggcggaggaggaagcggtggtggaggttccgagattgtgctgactcaatcacccgcgaccctgagcctgtcccccggcgaaagggccactctgtcctgtcgggccagccaatcagtctcctcctcgtacctggcctggtaccagcagaagccaggacaggctccgagactccttatctatggcgcatcctcccgcgccaccggaatcccggataggttctcgggaaacggatcggggaccgacttcactctcaccatctcccggctggaaccggaggacttcgccgtgtactactgccagcagtacggcagcccgcctagattcactttcggccccggcaccaaagtggacatcaag

SEQ ID NO: 2019 - protein, 5 aa, Artificial Sequence
  source: /note="Description of Artificial Sequence: Synthetic peptide"
NYNLH

SEQ ID NO: 2020 - protein, 17 aa, Artificial Sequence
  source: /note="Description of Artificial Sequence: Synthetic peptide"
AIYPGNYDTSYNQKFKG

SEQ ID NO: 2021 - protein, 13 aa, Artificial Sequence
  source: /note="Description of Artificial Sequence: Synthetic peptide"
VDFGHSRYWYFDV

SEQ ID NO: 2022 - protein, 7 aa, Artificial Sequence
  source: /note="Description of Artificial Sequence: Synthetic peptide"
GYTFTNY

SEQ ID NO: 2023 - protein, 6 aa, Artificial Sequence
  source: /note="Description of Artificial Sequence: Synthetic peptide"
YPGNYD

SEQ ID NO: 2024 - protein, 8 aa, Artificial Sequence
  source: /note="Description of Artificial Sequence: Synthetic peptide"
GYTFTNYN

SEQ ID NO: 2025 - protein, 8 aa, Artificial Sequence
  source: /note="Description of Artificial Sequence: Synthetic peptide"
IYPGNYDT

SEQ ID NO: 2026 - protein, 15 aa, Artificial Sequence
  source: /note="Description of Artificial Sequence: Synthetic peptide"
ARVDFGHSRYWYFDV

SEQ ID NO: 2027 - protein, 10 aa, Artificial Sequence
  source: /note="Description of Artificial Sequence: Synthetic peptide"
GYTFTNYNLH

SEQ ID NO: 2028 - protein, 122 aa, Artificial Sequence
  source: /note="Description of Artificial Sequence: Synthetic polypeptide"
QVQLVQSGAEVKKPGASVKVSCKASGYTFTNYNLHWVRQAPGQGLEWMGAIYPGNYDTSYNQKFKGRVTMTADKSTSTAYMELSSLRSEDTAVYYCARVDFGHSRYWYFDVWGQGTTVTVSS

SEQ ID NO: 2029 - DNA, 366 bp, Artificial Sequence
  source: /note="Description of Artificial Sequence: Synthetic polynucleotide"
caagtccaactcgtccagtccggtgcagaagtcaagaaacctggagcatccgtgaaagtgtcttgcaaagcctccggctacaccttcaccaactacaacctccattgggtcagacaggcccccggacaaggactcgaatggatgggagcgatctacccgggaaactacgacaccagctacaaccagaagttcaagggccgcgtgactatgaccgccgataagagcacctccaccgcctacatggaactgtcctcgctgaggtccgaggacactgcggtgtactactgcgcccgcgtggacttcggacactcacggtattggtacttcgacgtctggggacagggcactaccgtgaccgtgtcgagc

SEQ ID NO: 2030 - protein, 10 aa, Artificial Sequence
  source: /note="Description of Artificial Sequence: Synthetic peptide"
RATSSVSSMN

SEQ ID NO: 2031 - protein, 7 aa, Artificial Sequence
  source: /note="Description of Artificial Sequence: Synthetic peptide"
ATSNLAS

SEQ ID NO: 2032 - protein, 9 aa, Artificial Sequence
  source: /note="Description of Artificial Sequence: Synthetic peptide"
QQWTFNPPT

SEQ ID NO: 2033 - protein, 6 aa, Artificial Sequence
  source: /note="Description of Artificial Sequence: Synthetic peptide"
TSSVSS

SEQ ID NO: 2034 - protein, 3 aa, Artificial Sequence
  source: /note="Description of Artificial Sequence: Synthetic peptide"
ATS

SEQ ID NO: 2035 - protein, 6 aa, Artificial Sequence
  source: /note="Description of Artificial Sequence: Synthetic peptide"
WTFNPP

SEQ ID NO: 2036 - protein, 5 aa, Artificial Sequence
  source: /note="Description of Artificial Sequence: Synthetic peptide"
SSVSS

SEQ ID NO: 2037 - protein, 106 aa, Artificial Sequence
  source: /note="Description of Artificial Sequence: Synthetic polypeptide"
DIQLTQSPSFLSASVGDRVTITCRATSSVSSMNWYQQKPGKAPKPLIHATSNLASGVPSRFSGSGSGTEYTLTISSLQPEDFATYYCQQWTFNPPTFGQGTKLEIK

SEQ ID NO: 2038 - DNA, 318 bp, Artificial Sequence
  source: /note="Description of Artificial Sequence: Synthetic polynucleotide"
gatatccagctgactcagtccccgtcattcctgtccgcctccgtgggagacagagtgaccatcacctgtcgggccacttcctccgtgtcaagcatgaactggtatcagcagaagcccgggaaggccccaaagccgctgattcacgcgacgtccaacctggcttccggcgtgccgagccggttctccggctcggggagcgggactgagtacaccctgactatttcctcgcttcaacccgaggactttgctacctactactgccaacagtggaccttcaatcctccgacattcggacagggtaccaagttggaaatcaag

SEQ ID NO: 2039 - protein, 248 aa, Artificial Sequence
  source: /note="Description of Artificial Sequence: Synthetic polypeptide"
QVQLVQSGAEVKKPGASVKVSCKASGYTFTNYNLHWVRQAPGQGLEWMGAIYPGNYDTSYNQKFKGRVTMTADKSTSTAYMELSSLRSEDTAVYYCARVDFGHSRYWYFDVWGQGTTVTVSSGGGGSGGGGSGGGGSGGGGSDIQLTQSPSFLSASVGDRVTITCRATSSVSSMNWYQQKPGKAPKPLIHATSNLASGVPSRFSGSGSGTEYTLTISSLQPEDFATYYCQQWTFNPPTFGQGTKLEIK

SEQ ID NO: 2040 - DNA, 744 bp, Artificial Sequence
  source: /note="Description of Artificial Sequence: Synthetic polynucleotide"
caagtccaactcgtccagtccggtgcagaagtcaagaaacctggagcatccgtgaaagtgtcttgcaaagcctccggctacaccttcaccaactacaacctccattgggtcagacaggcccccggacaaggactcgaatggatgggagcgatctacccgggaaactacgacaccagctacaaccagaagttcaagggccgcgtgactatgaccgccgataagagcacctccaccgcctacatggaactgtcctcgctgaggtccgaggacactgcggtgtactactgcgcccgcgtggacttcggacactcacggtattggtacttcgacgtctggggacagggcactaccgtgaccgtgtcgagcggcggaggaggttcgggagggggcggatcagggggcggcggcagcggtggagggggctcggatatccagctgactcagtccccgtcattcctgtccgcctccgtgggagacagagtgaccatcacctgtcgggccacttcctccgtgtcaagcatgaactggtatcagcagaagcccgggaaggccccaaagccgctgattcacgcgacgtccaacctggcttccggcgtgccgagccggttctccggctcggggagcgggactgagtacaccctgactatttcctcgcttcaacccgaggactttgctacctactactgccaacagtggaccttcaatcctccgacattcggacagggtaccaagttggaaatcaag

SEQ ID NO: 2041 - protein, 492 aa, Artificial Sequence
  source: /note="Description of Artificial Sequence: Synthetic polypeptide"
MALPVTALLLPLALLLHAARPQVQLVQSGAEVKKPGASVKVSCKASGYTFTNYNLHWVRQAPGQGLEWMGAIYPGNYDTSYNQKFKGRVTMTADKSTSTAYMELSSLRSEDTAVYYCARVDFGHSRYWYFDVWGQGTTVTVSSGGGGSGGGGSGGGGSGGGGSDIQLTQSPSFLSASVGDRVTITCRATSSVSSMNWYQQKPGKAPKPLIHATSNLASGVPSRFSGSGSGTEYTLTISSLQPEDFATYYCQQWTFNPPTFGQGTKLEIKTTTPAPRPPTPAPTIASQPLSLRPEACRPAAGGAVHTRGLDFACDIYIWAPLAGTCGVLLLSLVITLYCKRGRKKLLYIFKQPFMRPVQTTQEEDGCSCRFPEEEEGGCELRVKFSRSADAPAYQQGQNQLYNELNLGRREEYDVLDKRRGRDPEMGGKPRRKNPQEGLYNELQKDKMAEAYSEIGMKGERRRGKGHDGLYQGLSTATKDTYDALHMQALPPR

SEQ ID NO: 2042 - DNA, 1476 bp, Artificial Sequence
  source: /note="Description of Artificial Sequence: Synthetic polynucleotide"
atggccctccctgtcaccgccctgctgcttccgctggctcttctgctccacgccgctcggccccaagtccaactcgtccagtccggtgcagaagtcaagaaacctggagcatccgtgaaagtgtcttgcaaagcctccggctacaccttcaccaactacaacctccattgggtcagacaggcccccggacaaggactcgaatggatgggagcgatctacccgggaaactacgacaccagctacaaccagaagttcaagggccgcgtgactatgaccgccgataagagcacctccaccgcctacatggaactgtcctcgctgaggtccgaggacactgcggtgtactactgcgcccgcgtggacttcggacactcacggtattggtacttcgacgtctggggacagggcactaccgtgaccgtgtcgagcggcggaggaggttcgggagggggcggatcagggggcggcggcagcggtggagggggctcggatatccagctgactcagtccccgtcattcctgtccgcctccgtgggagacagagtgaccatcacctgtcgggccacttcctccgtgtcaagcatgaactggtatcagcagaagcccgggaaggccccaaagccgctgattcacgcgacgtccaacctggcttccggcgtgccgagccggttctccggctcggggagcgggactgagtacaccctgactatttcctcgcttcaacccgaggactttgctacctactactgccaacagtggaccttcaatcctccgacattcggacagggtaccaagttggaaatcaagaccactaccccagcaccgaggccacccaccccggctcctaccatcgcctcccagcctctgtccctgcgtccggaggcatgtagacccgcagctggtggggccgtgcatacccggggtcttgacttcgcctgcgatatctacatttgggcccctctggctggtacttgcggggtcctgctgctttcactcgtgatcactctttactgtaagcgcggtcggaagaagctgctgtacatctttaagcaacccttcatgaggcctgtgcagactactcaagaggaggacggctgttcatgccggttcccagaggaggaggaaggcggctgcgaactgcgcgtgaaattcagccgcagcgcagatgctccagcctaccagcaggggcagaaccagctctacaacgaactcaatcttggtcggagagaggagtacgacgtgctggacaagcggagaggacgggacccagaaatgggcgggaagccgcgcagaaagaatccccaagagggcctgtacaacgagctccaaaaggataagatggcagaagcctatagcgagattggtatgaaaggggaacgcagaagaggcaaaggccacgacggactgtaccagggactcagcaccgccaccaaggacacctatgacgctcttcacatgcaggccctgccgcctcgg

SEQ ID NO: 2043 - protein, 5 aa, Artificial Sequence
  source: /note="Description of Artificial Sequence: Synthetic peptide"
SYNMH

SEQ ID NO: 2044 - protein, 17 aa, Artificial Sequence
  source: /note="Description of Artificial Sequence: Synthetic peptide"
AIYPGNGDTSYNPKFKG

SEQ ID NO: 2045 - protein, 13 aa, Artificial Sequence
  source: /note="Description of Artificial Sequence: Synthetic peptide"
SYFYGSSSWYFDV

SEQ ID NO: 2046 - protein, 7 aa, Artificial Sequence
  source: /note="Description of Artificial Sequence: Synthetic peptide"
GYTFTSY

SEQ ID NO: 2047 - protein, 6 aa, Artificial Sequence
  source: /note="Description of Artificial Sequence: Synthetic peptide"
YPGNGD

SEQ ID NO: 2048 - protein, 8 aa, Artificial Sequence
  source: /note="Description of Artificial Sequence: Synthetic peptide"
GYTFTSYN

SEQ ID NO: 2049 - protein, 8 aa, Artificial Sequence
  source: /note="Description of Artificial Sequence: Synthetic peptide"
IYPGNGDT

SEQ ID NO: 2050 - protein, 15 aa, Artificial Sequence
  source: /note="Description of Artificial Sequence: Synthetic peptide"
ARSYFYGSSSWYFDV

SEQ ID NO: 2051 - protein, 10 aa, Artificial Sequence
  source: /note="Description of Artificial Sequence: Synthetic peptide"
GYTFTSYNMH

SEQ ID NO: 2052 - protein, 122 aa, Artificial Sequence
  source: /note="Description of Artificial Sequence: Synthetic polypeptide"
QVQLVQSGAEVKKPGASVKVSCKASGYTFTSYNMHWVRQAPGQGLEWMGAIYPGNGDTSYNPKFKGRVTMTADKSTRTAYMELSSLRSEDTAVYYCARSYFYGSSSWYFDVWGQGTTVTVSS

SEQ ID NO: 2053 - DNA, 366 bp, Artificial Sequence
  source: /note="Description of Artificial Sequence: Synthetic polynucleotide"
caagtgcagctcgtccagtccggtgcagaagtcaagaaacccggtgcttcagtgaaagtgtcctgcaaggcctccggttacaccttcacctcctacaacatgcactgggtccgccaagccccgggccagggactcgaatggatgggagccatctaccctggcaacggggacacctcatacaaccctaagttcaagggcagagtgaccatgactgcggacaagtccactagaacagcgtacatggagctgagcagcctgcggtccgaggatactgccgtgtactactgcgcccgctcctacttctacggaagctcgtcgtggtacttcgatgtctggggacagggcaccactgtgactgtgtcctcc

SEQ ID NO: 2054 - protein, 10 aa, Artificial Sequence
  source: /note="Description of Artificial Sequence: Synthetic peptide"
RASSSVSSMH

SEQ ID NO: 2055 - protein, 9 aa, Artificial Sequence
  source: /note="Description of Artificial Sequence: Synthetic peptide"
QQWIFNPPT

SEQ ID NO: 2056 - protein, 6 aa, Artificial Sequence
  source: /note="Description of Artificial Sequence: Synthetic peptide"
SSSVSS

SEQ ID NO: 2057 - protein, 6 aa, Artificial Sequence
  source: /note="Description of Artificial Sequence: Synthetic peptide"
WIFNPP

SEQ ID NO: 2058 - protein, 106 aa, Artificial Sequence
  source: /note="Description of Artificial Sequence: Synthetic polypeptide"
EIVLTQSPATLSLSPGERATLSCRASSSVSSMHWYQQKPGQAPRPLIFATSNLASGIPARFSGSGSGTDYTLTISSLEPEDAAVYYCQQWIFNPPTFGGGTKVEIK

SEQ ID NO: 2059 - DNA, 318 bp, Artificial Sequence
  source: /note="Description of Artificial Sequence: Synthetic polynucleotide"
gaaattgtgctgactcagagccccgccaccctgagcttgtcccccggggaaagggcaacgctgtcatgccgcgcctcgtcatccgtgtcctccatgcattggtaccagcagaagccgggacaggcccctcggccgctgatcttcgccacctccaatctcgcttccggcattccggcccggttctcgggaagcgggtcggggaccgactataccctgaccatctctagccttgaacctgaggacgccgcggtgtactattgtcaacagtggatctttaaccccccaaccttcggtggaggcaccaaagtggagattaag

SEQ ID NO: 2060 - protein, 248 aa, Artificial Sequence
  source: /note="Description of Artificial Sequence: Synthetic polypeptide"
QVQLVQSGAEVKKPGASVKVSCKASGYTFTSYNMHWVRQAPGQGLEWMGAIYPGNGDTSYNPKFKGRVTMTADKSTRTAYMELSSLRSEDTAVYYCARSYFYGSSSWYFDVWGQGTTVTVSSGGGGSGGGGSGGGGSGGGGSEIVLTQSPATLSLSPGERATLSCRASSSVSSMHWYQQKPGQAPRPLIFATSNLASGIPARFSGSGSGTDYTLTISSLEPEDAAVYYCQQWIFNPPTFGGGTKVEIK

SEQ ID NO: 2061 - DNA, 744 bp, Artificial Sequence
  source: /note="Description of Artificial Sequence: Synthetic polynucleotide"
caagtgcagctcgtccagtccggtgcagaagtcaagaaacccggtgcttcagtgaaagtgtcctgcaaggcctccggttacaccttcacctcctacaacatgcactgggtccgccaagccccgggccagggactcgaatggatgggagccatctaccctggcaacggggacacctcatacaaccctaagttcaagggcagagtgaccatgactgcggacaagtccactagaacagcgtacatggagctgagcagcctgcggtccgaggatactgccgtgtactactgcgcccgctcctacttctacggaagctcgtcgtggtacttcgatgtctggggacagggcaccactgtgactgtgtcctccggtggcggaggctcgggcggaggcggaagcggcggcgggggatcgggaggaggagggtccgaaattgtgctgactcagagccccgccaccctgagcttgtcccccggggaaagggcaacgctgtcatgccgcgcctcgtcatccgtgtcctccatgcattggtaccagcagaagccgggacaggcccctcggccgctgatcttcgccacctccaatctcgcttccggcattccggcccggttctcgggaagcgggtcggggaccgactataccctgaccatctctagccttgaacctgaggacgccgcggtgtactattgtcaacagtggatctttaaccccccaaccttcggtggaggcaccaaagtggagattaag

SEQ ID NO: 2062 - protein, 492 aa, Artificial Sequence
  source: /note="Description of Artificial Sequence: Synthetic polypeptide"
MALPVTALLLPLALLLHAARPQVQLVQSGAEVKKPGASVKVSCKASGYTFTSYNMHWVRQAPGQGLEWMGAIYPGNGDTSYNPKFKGRVTMTADKSTRTAYMELSSLRSEDTAVYYCARSYFYGSSSWYFDVWGQGTTVTVSSGGGGSGGGGSGGGGSGGGGSEIVLTQSPATLSLSPGERATLSCRASSSVSSMHWYQQKPGQAPRPLIFATSNLASGIPARFSGSGSGTDYTLTISSLEPEDAAVYYCQQWIFNPPTFGGGTKVEIKTTTPAPRPPTPAPTIASQPLSLRPEACRPAAGGAVHTRGLDFACDIYIWAPLAGTCGVLLLSLVITLYCKRGRKKLLYIFKQPFMRPVQTTQEEDGCSCRFPEEEEGGCELRVKFSRSADAPAYQQGQNQLYNELNLGRREEYDVLDKRRGRDPEMGGKPRRKNPQEGLYNELQKDKMAEAYSEIGMKGERRRGKGHDGLYQGLSTATKDTYDALHMQALPPR

SEQ ID NO: 2063 - DNA, 1476 bp, Artificial Sequence
  source: /note="Description of Artificial Sequence: Synthetic polynucleotide"
atggccctccctgtcaccgccctgctgcttccgctggctcttctgctccacgccgctcggccccaagtgcagctcgtccagtccggtgcagaagtcaagaaacccggtgcttcagtgaaagtgtcctgcaaggcctccggttacaccttcacctcctacaacatgcactgggtccgccaagccccgggccagggactcgaatggatgggagccatctaccctggcaacggggacacctcatacaaccctaagttcaagggcagagtgaccatgactgcggacaagtccactagaacagcgtacatggagctgagcagcctgcggtccgaggatactgccgtgtactactgcgcccgctcctacttctacggaagctcgtcgtggtacttcgatgtctggggacagggcaccactgtgactgtgtcctccggtggcggaggctcgggcggaggcggaagcggcggcgggggatcgggaggaggagggtccgaaattgtgctgactcagagccccgccaccctgagcttgtcccccggggaaagggcaacgctgtcatgccgcgcctcgtcatccgtgtcctccatgcattggtaccagcagaagccgggacaggcccctcggccgctgatcttcgccacctccaatctcgcttccggcattccggcccggttctcgggaagcgggtcggggaccgactataccctgaccatctctagccttgaacctgaggacgccgcggtgtactattgtcaacagtggatctttaaccccccaaccttcggtggaggcaccaaagtggagattaagaccactaccccagcaccgaggccacccaccccggctcctaccatcgcctcccagcctctgtccctgcgtccggaggcatgtagacccgcagctggtggggccgtgcatacccggggtcttgacttcgcctgcgatatctacatttgggcccctctggctggtacttgcggggtcctgctgctttcactcgtgatcactctttactgtaagcgcggtcggaagaagctgctgtacatctttaagcaacccttcatgaggcctgtgcagactactcaagaggaggacggctgttcatgccggttcccagaggaggaggaaggcggctgcgaactgcgcgtgaaattcagccgcagcgcagatgctccagcctaccagcaggggcagaaccagctctacaacgaactcaatcttggtcggagagaggagtacgacgtgctggacaagcggagaggacgggacccagaaatgggcgggaagccgcgcagaaagaatccccaagagggcctgtacaacgagctccaaaaggataagatggcagaagcctatagcgagattggtatgaaaggggaacgcagaagaggcaaaggccacgacggactgtaccagggactcagcaccgccaccaaggacacctatgacgctcttcacatgcaggccctgccgcctcgg

SEQ ID NO: 2064 - protein, 5 aa, Artificial Sequence
  source: /note="Description of Artificial Sequence: Synthetic peptide"
NYWMH

SEQ ID NO: 2065 - protein, 17 aa, Artificial Sequence
  source: /note="Description of Artificial Sequence: Synthetic peptide"
FITPTTGYPEYNQKFKD

SEQ ID NO: 2066 - protein, 13 aa, Artificial Sequence
  source: /note="Description of Artificial Sequence: Synthetic peptide"
RKVGKGVYYALDY

SEQ ID NO: 2067 - protein, 6 aa, Artificial Sequence
  source: /note="Description of Artificial Sequence: Synthetic peptide"
TPTTGY

SEQ ID NO: 2068 - protein, 8 aa, Artificial Sequence
  source: /note="Description of Artificial Sequence: Synthetic peptide"
GYTFTNYW

SEQ ID NO: 2069 - protein, 8 aa, Artificial Sequence
  source: /note="Description of Artificial Sequence: Synthetic peptide"
ITPTTGYP

SEQ ID NO: 2070 - protein, 15 aa, Artificial Sequence
  source: /note="Description of Artificial Sequence: Synthetic peptide"
ARRKVGKGVYYALDY

SEQ ID NO: 2071 - protein, 10 aa, Artificial Sequence
  source: /note="Description of Artificial Sequence: Synthetic peptide"
GYTFTNYWMH

SEQ ID NO: 2072 - protein, 122 aa, Artificial Sequence
  source: /note="Description of Artificial Sequence: Synthetic polypeptide"
QVQLVQSGAEVKKPGASVKVSCKASGYTFTNYWMHWVRQAPGQGLEWMGFITPTTGYPEYNQKFKDRVTMTADKSTSTAYMELSSLRSEDTAVYYCARRKVGKGVYYALDYWGQGTTVTVSS

SEQ ID NO: 2073 - DNA, 366 bp, Artificial Sequence
  source: /note="Description of Artificial Sequence: Synthetic polynucleotide"
caagtgcaactcgtccagtccggtgcagaagtcaagaaaccaggcgcatccgtgaaagtctcctgcaaagcctccggctacacattcactaactattggatgcattgggtgcgccaggccccgggacaggggctggagtggatggggttcattacccctaccaccggctaccctgagtacaaccagaagttcaaggatagggtcaccatgaccgctgacaagtccacctccaccgcgtacatggaactgtcatcgctccggtccgaggataccgcggtgtactactgcgcccggagaaaagtcggaaagggagtgtattacgccttggactactggggacaggggactaccgtgaccgtgtcgagc

SEQ ID NO: 2074 - protein, 11 aa, Artificial Sequence
  source: /note="Description of Artificial Sequence: Synthetic peptide"
RASGNIHNYLA

SEQ ID NO: 2075 - protein, 7 aa, Artificial Sequence
  source: /note="Description of Artificial Sequence: Synthetic peptide"
NTKTLAD

SEQ ID NO: 2076 - protein, 9 aa, Artificial Sequence
  source: /note="Description of Artificial Sequence: Synthetic peptide"
QHFWSSPWT

SEQ ID NO: 2077 - protein, 7 aa, Artificial Sequence
  source: /note="Description of Artificial Sequence: Synthetic peptide"
SGNIHNY

SEQ ID NO: 2078 - protein, 3 aa, Artificial Sequence
  source: /note="Description of Artificial Sequence: Synthetic peptide"
NTK

SEQ ID NO: 2079 - protein, 6 aa, Artificial Sequence
  source: /note="Description of Artificial Sequence: Synthetic peptide"
FWSSPW

SEQ ID NO: 2080 - protein, 6 aa, Artificial Sequence
  source: /note="Description of Artificial Sequence: Synthetic peptide"
GNIHNY

SEQ ID NO: 2081 - protein, 107 aa, Artificial Sequence
  source: /note="Description of Artificial Sequence: Synthetic polypeptide"
DIQMTQSPSSLSASVGDRVTITCRASGNIHNYLAWYQQKPGKVPKLLIYNTKTLADGVPSRFSGSGSGTDYTLTISSLQPEDVATYYCQHFWSSPWTFGGGTKVEIK

SEQ ID NO: 2082 - DNA, 321 bp, Artificial Sequence
  source: /note="Description of Artificial Sequence: Synthetic polynucleotide"
gacatccagatgacccagtccccgtcaagccttagcgcctccgtgggcgaccgcgtgaccattacttgtcgggcgtcgggaaacatccacaactacctcgcctggtaccagcagaagccgggaaaggtccccaagctgctgatctacaataccaagactctggccgacggagtgccttcccgcttttccggttcgggaagcgggactgactacaccctgactatctcctcgctgcaacccgaagatgtggctacgtactactgccagcacttctggtcctctccctggaccttcggcggtggcactaaggtcgagattaag

SEQ ID NO: 2083 - protein, 249 aa, Artificial Sequence
  source: /note="Description of Artificial Sequence: Synthetic polypeptide"
QVQLVQSGAEVKKPGASVKVSCKASGYTFTNYWMHWVRQAPGQGLEWMGFITPTTGYPEYNQKFKDRVTMTADKSTSTAYMELSSLRSEDTAVYYCARRKVGKGVYYALDYWGQGTTVTVSSGGGGSGGGGSGGGGSGGGGSDIQMTQSPSSLSASVGDRVTITCRASGNIHNYLAWYQQKPGKVPKLLIYNTKTLADGVPSRFSGSGSGTDYTLTISSLQPEDVATYYCQHFWSSPWTFGGGTKVEIK

SEQ ID NO: 2084 - DNA, 747 bp, Artificial Sequence
  source: /note="Description of Artificial Sequence: Synthetic polynucleotide"
caagtgcaactcgtccagtccggtgcagaagtcaagaaaccaggcgcatccgtgaaagtctcctgcaaagcctccggctacacattcactaactattggatgcattgggtgcgccaggccccgggacaggggctggagtggatggggttcattacccctaccaccggctaccctgagtacaaccagaagttcaaggatagggtcaccatgaccgctgacaagtccacctccaccgcgtacatggaactgtcatcgctccggtccgaggataccgcggtgtactactgcgcccggagaaaagtcggaaagggagtgtattacgccttggactactggggacaggggactaccgtgaccgtgtcgagcggtggaggcggctccggcggaggaggaagcgggggaggcggttcagggggcggaggaagcgacatccagatgacccagtccccgtcaagccttagcgcctccgtgggcgaccgcgtgaccattacttgtcgggcgtcgggaaacatccacaactacctcgcctggtaccagcagaagccgggaaaggtccccaagctgctgatctacaataccaagactctggccgacggagtgccttcccgcttttccggttcgggaagcgggactgactacaccctgactatctcctcgctgcaacccgaagatgtggctacgtactactgccagcacttctggtcctctccctggaccttcggcggtggcactaaggtcgagattaag

SEQ ID NO: 2085 - protein, 493 aa, Artificial Sequence
  source: /note="Description of Artificial Sequence: Synthetic polypeptide"
MALPVTALLLPLALLLHAARPQVQLVQSGAEVKKPGASVKVSCKASGYTFTNYWMHWVRQAPGQGLEWMGFITPTTGYPEYNQKFKDRVTMTADKSTSTAYMELSSLRSEDTAVYYCARRKVGKGVYYALDYWGQGTTVTVSSGGGGSGGGGSGGGGSGGGGSDIQMTQSPSSLSASVGDRVTITCRASGNIHNYLAWYQQKPGKVPKLLIYNTKTLADGVPSRFSGSGSGTDYTLTISSLQPEDVATYYCQHFWSSPWTFGGGTKVEIKTTTPAPRPPTPAPTIASQPLSLRPEACRPAAGGAVHTRGLDFACDIYIWAPLAGTCGVLLLSLVITLYCKRGRKKLLYIFKQPFMRPVQTTQEEDGCSCRFPEEEEGGCELRVKFSRSADAPAYQQGQNQLYNELNLGRREEYDVLDKRRGRDPEMGGKPRRKNPQEGLYNELQKDKMAEAYSEIGMKGERRRGKGHDGLYQGLSTATKDTYDALHMQALPPR

SEQ ID NO: 2086 - DNA, 1479 bp, Artificial Sequence
  source: /note="Description of Artificial Sequence: Synthetic polynucleotide"
atggccctccctgtcaccgccctgctgcttccgctggctcttctgctccacgccgctcggccccaagtgcaactcgtccagtccggtgcagaagtcaagaaaccaggcgcatccgtgaaagtctcctgcaaagcctccggctacacattcactaactattggatgcattgggtgcgccaggccccgggacaggggctggagtggatggggttcattacccctaccaccggctaccctgagtacaaccagaagttcaaggatagggtcaccatgaccgctgacaagtccacctccaccgcgtacatggaactgtcatcgctccggtccgaggataccgcggtgtactactgcgcccggagaaaagtcggaaagggagtgtattacgccttggactactggggacaggggactaccgtgaccgtgtcgagcggtggaggcggctccggcggaggaggaagcgggggaggcggttcagggggcggaggaagcgacatccagatgacccagtccccgtcaagccttagcgcctccgtgggcgaccgcgtgaccattacttgtcgggcgtcgggaaacatccacaactacctcgcctggtaccagcagaagccgggaaaggtccccaagctgctgatctacaataccaagactctggccgacggagtgccttcccgcttttccggttcgggaagcgggactgactacaccctgactatctcctcgctgcaacccgaagatgtggctacgtactactgccagcacttctggtcctctccctggaccttcggcggtggcactaaggtcgagattaagaccactaccccagcaccgaggccacccaccccggctcctaccatcgcctcccagcctctgtccctgcgtccggaggcatgtagacccgcagctggtggggccgtgcatacccggggtcttgacttcgcctgcgatatctacatttgggcccctctggctggtacttgcggggtcctgctgctttcactcgtgatcactctttactgtaagcgcggtcggaagaagctgctgtacatctttaagcaacccttcatgaggcctgtgcagactactcaagaggaggacggctgttcatgccggttcccagaggaggaggaaggcggctgcgaactgcgcgtgaaattcagccgcagcgcagatgctccagcctaccagcaggggcagaaccagctctacaacgaactcaatcttggtcggagagaggagtacgacgtgctggacaagcggagaggacgggacccagaaatgggcgggaagccgcgcagaaagaatccccaagagggcctgtacaacgagctccaaaaggataagatggcagaagcctatagcgagattggtatgaaaggggaacgcagaagaggcaaaggccacgacggactgtaccagggactcagcaccgccaccaaggacacctatgacgctcttcacatgcaggccctgccgcctcgg

SEQ ID NO: 2087 - protein, 122 aa, Artificial Sequence
  source: /note="Description of Artificial Sequence: Synthetic polypeptide"
QVQLVQSGAEVKKPGSSVKVSCKASGYTFTNYWMHWVRQAPGQGLEWMGFITPTTGYPEYNQKFKDRVTITADKSTSTAYMELSSLRSEDTAVYYCARRKVGKGVYYALDYWGQGTTVTVSS

SEQ ID NO: 2088 - DNA, 366 bp, Artificial Sequence
  source: /note="Description of Artificial Sequence: Synthetic polynucleotide"
caagtccaactcgtccaatcaggagcagaagtcaagaagcccggaagctctgtcaaagtgtcctgcaaggcctccggttacaccttcaccaactattggatgcactgggtcagacaggccccgggacagggcttggaatggatgggtttcatcactccaaccaccggttacccggagtacaaccagaagtttaaggaccgcgtgaccattactgccgacaagtccacgagcaccgcttacatggaacttagcagcctgcggtccgaggacactgccgtgtattactgcgcgcggaggaaggtcggaaagggagtgtactacgcactggactactggggccagggaaccaccgtgactgtgtcctcc

SEQ ID NO: 2089 - DNA, 321 bp, Artificial Sequence
  source: /note="Description of Artificial Sequence: Synthetic polynucleotide"
gatattcagatgacccagtccccttcatccctgagcgcctcagtgggcgatagagtgaccatcacttgtcgcgcctcgggcaatatccacaactacctcgcctggtaccagcagaagccgggaaaagtgcctaagctgctgatctacaacactaagaccctggcggatggagtgcccagccggttctccggctccggcagcggcacagactacaccctcaccatctcctcgctgcaaccagaggacgtggctacctactactgccagcatttctggtcgtccccctggactttcggaggggggaccaaagtggagattaag

SEQ ID NO: 2090 - protein, 249 aa, Artificial Sequence
  source: /note="Description of Artificial Sequence: Synthetic polypeptide"
QVQLVQSGAEVKKPGSSVKVSCKASGYTFTNYWMHWVRQAPGQGLEWMGFITPTTGYPEYNQKFKDRVTITADKSTSTAYMELSSLRSEDTAVYYCARRKVGKGVYYALDYWGQGTTVTVSSGGGGSGGGGSGGGGSGGGGSDIQMTQSPSSLSASVGDRVTITCRASGNIHNYLAWYQQKPGKVPKLLIYNTKTLADGVPSRFSGSGSGTDYTLTISSLQPEDVATYYCQHFWSSPWTFGGGTKVEIK

SEQ ID NO: 2091 - DNA, 747 bp, Artificial Sequence
  source: /note="Description of Artificial Sequence: Synthetic polynucleotide"
caagtccaactcgtccaatcaggagcagaagtcaagaagcccggaagctctgtcaaagtgtcctgcaaggcctccggttacaccttcaccaactattggatgcactgggtcagacaggccccgggacagggcttggaatggatgggtttcatcactccaaccaccggttacccggagtacaaccagaagtttaaggaccgcgtgaccattactgccgacaagtccacgagcaccgcttacatggaacttagcagcctgcggtccgaggacactgccgtgtattactgcgcgcggaggaaggtcggaaagggagtgtactacgcactggactactggggccagggaaccaccgtgactgtgtcctccggtggcggagggtcgggaggggggggctcgggaggaggagggtccgggggcggtggctcagatattcagatgacccagtccccttcatccctgagcgcctcagtgggcgatagagtgaccatcacttgtcgcgcctcgggcaatatccacaactacctcgcctggtaccagcagaagccgggaaaagtgcctaagctgctgatctacaacactaagaccctggcggatggagtgcccagccggttctccggctccggcagcggcacagactacaccctcaccatctcctcgctgcaaccagaggacgtggctacctactactgccagcatttctggtcgtccccctggactttcggaggggggaccaaagtggagattaag

SEQ ID NO: 2092 - protein, 493 aa, Artificial Sequence
  source: /note="Description of Artificial Sequence: Synthetic polypeptide"
MALPVTALLLPLALLLHAARPQVQLVQSGAEVKKPGSSVKVSCKASGYTFTNYWMHWVRQAPGQGLEWMGFITPTTGYPEYNQKFKDRVTITADKSTSTAYMELSSLRSEDTAVYYCARRKVGKGVYYALDYWGQGTTVTVSSGGGGSGGGGSGGGGSGGGGSDIQMTQSPSSLSASVGDRVTITCRASGNIHNYLAWYQQKPGKVPKLLIYNTKTLADGVPSRFSGSGSGTDYTLTISSLQPEDVATYYCQHFWSSPWTFGGGTKVEIKTTTPAPRPPTPAPTIASQPLSLRPEACRPAAGGAVHTRGLDFACDIYIWAPLAGTCGVLLLSLVITLYCKRGRKKLLYIFKQPFMRPVQTTQEEDGCSCRFPEEEEGGCELRVKFSRSADAPAYQQGQNQLYNELNLGRREEYDVLDKRRGRDPEMGGKPRRKNPQEGLYNELQKDKMAEAYSEIGMKGERRRGKGHDGLYQGLSTATKDTYDALHMQALPPR

SEQ ID NO: 2093 - DNA, 1479 bp, Artificial Sequence
  source: /note="Description of Artificial Sequence: Synthetic polynucleotide"
atggccctccctgtcaccgccctgctgcttccgctggctcttctgctccacgccgctcggccccaagtccaactcgtccaatcaggagcagaagtcaagaagcccggaagctctgtcaaagtgtcctgcaaggcctccggttacaccttcaccaactattggatgcactgggtcagacaggccccgggacagggcttggaatggatgggtttcatcactccaaccaccggttacccggagtacaaccagaagtttaaggaccgcgtgaccattactgccgacaagtccacgagcaccgcttacatggaacttagcagcctgcggtccgaggacactgccgtgtattactgcgcgcggaggaaggtcggaaagggagtgtactacgcactggactactggggccagggaaccaccgtgactgtgtcctccggtggcggagggtcgggaggggggggctcgggaggaggagggtccgggggcggtggctcagatattcagatgacccagtccccttcatccctgagcgcctcagtgggcgatagagtgaccatcacttgtcgcgcctcgggcaatatccacaactacctcgcctggtaccagcagaagccgggaaaagtgcctaagctgctgatctacaacactaagaccctggcggatggagtgcccagccggttctccggctccggcagcggcacagactacaccctcaccatctcctcgctgcaaccagaggacgtggctacctactactgccagcatttctggtcgtccccctggactttcggaggggggaccaaagtggagattaagaccactaccccagcaccgaggccacccaccccggctcctaccatcgcctcccagcctctgtccctgcgtccggaggcatgtagacccgcagctggtggggccgtgcatacccggggtcttgacttcgcctgcgatatctacatttgggcccctctggctggtacttgcggggtcctgctgctttcactcgtgatcactctttactgtaagcgcggtcggaagaagctgctgtacatctttaagcaacccttcatgaggcctgtgcagactactcaagaggaggacggctgttcatgccggttcccagaggaggaggaaggcggctgcgaactgcgcgtgaaattcagccgcagcgcagatgctccagcctaccagcaggggcagaaccagctctacaacgaactcaatcttggtcggagagaggagtacgacgtgctggacaagcggagaggacgggacccagaaatgggcgggaagccgcgcagaaagaatccccaagagggcctgtacaacgagctccaaaaggataagatggcagaagcctatagcgagattggtatgaaaggggaacgcagaagaggcaaaggccacgacggactgtaccagggactcagcaccgccaccaaggacacctatgacgctcttcacatgcaggccctgccgcctcgg

SEQ ID NO: 2094 - DNA, 366 bp, Artificial Sequence
  source: /note="Description of Artificial Sequence: Synthetic polynucleotide"
caagtccaactcgtccagtccggtgcagaagtcaagaaacccggagcttccgtgaaagtgtcctgcaaagcctccggttacacctttacgaactactggatgcattgggtgcgccaggccccgggacaggggctggaatggatgggcttcattacccccaccaccggataccccgagtacaatcagaagttcaaggaccgggtcaccatgaccgccgacaagtcaacctctactgcttacatggagctgtccagcctgcggtcggaagataccgccgtgtattactgcgcgagaaggaaagtcggaaagggagtgtactatgccctggactactggggacaggggaccactgtgactgtgtcaagc

SEQ ID NO: 2095 - protein, 107 aa, Artificial Sequence
  source: /note="Description of Artificial Sequence: Synthetic polypeptide"
AIRMTQSPFSLSASVGDRVTITCRASGNIHNYLAWYQQKPAKAPKLFIYNTKTLADGVPSRFSGSGSGTDYTLTISSLQPEDFATYYCQHFWSSPWTFGGGTKVEIK

SEQ ID NO: 2096 - DNA, 321 bp, Artificial Sequence
  source: /note="Description of Artificial Sequence: Synthetic polynucleotide"
gcgatccgcatgacccagagcccgttctccctgtccgcgtccgtgggggaccgcgtgactatcacgtgtcgggcctccgggaacatccacaactacctcgcatggtaccagcagaagccggccaaggcccctaagttgttcatctacaacaccaagactcttgccgacggagtgccgtcccggtttagcggaagcggttccggcaccgactacaccctgactatctcgagcctgcaaccagaagatttcgccacttactactgccagcacttctggtcgtccccttggacattcggcggcggcaccaaggtcgagattaag

SEQ ID NO: 2097 - protein, 249 aa, Artificial Sequence
  source: /note="Description of Artificial Sequence: Synthetic polypeptide"
QVQLVQSGAEVKKPGASVKVSCKASGYTFTNYWMHWVRQAPGQGLEWMGFITPTTGYPEYNQKFKDRVTMTADKSTSTAYMELSSLRSEDTAVYYCARRKVGKGVYYALDYWGQGTTVTVSSGGGGSGGGGSGGGGSGGGGSAIRMTQSPFSLSASVGDRVTITCRASGNIHNYLAWYQQKPAKAPKLFIYNTKTLADGVPSRFSGSGSGTDYTLTISSLQPEDFATYYCQHFWSSPWTFGGGTKVEIK

SEQ ID NO: 2098 - DNA, 747 bp, Artificial Sequence
  source: /note="Description of Artificial Sequence: Synthetic polynucleotide"
caagtccaactcgtccagtccggtgcagaagtcaagaaacccggagcttccgtgaaagtgtcctgcaaagcctccggttacacctttacgaactactggatgcattgggtgcgccaggccccgggacaggggctggaatggatgggcttcattacccccaccaccggataccccgagtacaatcagaagttcaaggaccgggtcaccatgaccgccgacaagtcaacctctactgcttacatggagctgtccagcctgcggtcggaagataccgccgtgtattactgcgcgagaaggaaagtcggaaagggagtgtactatgccctggactactggggacaggggaccactgtgactgtgtcaagcggaggcggaggctcggggggcggaggttcgggcggaggaggatcagggggcggcggttccgcgatccgcatgacccagagcccgttctccctgtccgcgtccgtgggggaccgcgtgactatcacgtgtcgggcctccgggaacatccacaactacctcgcatggtaccagcagaagccggccaaggcccctaagttgttcatctacaacaccaagactcttgccgacggagtgccgtcccggtttagcggaagcggttccggcaccgactacaccctgactatctcgagcctgcaaccagaagatttcgccacttactactgccagcacttctggtcgtccccttggacattcggcggcggcaccaaggtcgagattaag

SEQ ID NO: 2099 - protein, 493 aa, Artificial Sequence
  source: /note="Description of Artificial Sequence: Synthetic polypeptide"
MALPVTALLLPLALLLHAARPQVQLVQSGAEVKKPGASVKVSCKASGYTFTNYWMHWVRQAPGQGLEWMGFITPTTGYPEYNQKFKDRVTMTADKSTSTAYMELSSLRSEDTAVYYCARRKVGKGVYYALDYWGQGTTVTVSSGGGGSGGGGSGGGGSGGGGSAIRMTQSPFSLSASVGDRVTITCRASGNIHNYLAWYQQKPAKAPKLFIYNTKTLADGVPSRFSGSGSGTDYTLTISSLQPEDFATYYCQHFWSSPWTFGGGTKVEIKTTTPAPRPPTPAPTIASQPLSLRPEACRPAAGGAVHTRGLDFACDIYIWAPLAGTCGVLLLSLVITLYCKRGRKKLLYIFKQPFMRPVQTTQEEDGCSCRFPEEEEGGCELRVKFSRSADAPAYQQGQNQLYNELNLGRREEYDVLDKRRGRDPEMGGKPRRKNPQEGLYNELQKDKMAEAYSEIGMKGERRRGKGHDGLYQGLSTATKDTYDALHMQALPPR

SEQ ID NO: 2100 - DNA, 1479 bp, Artificial Sequence
  source: /note="Description of Artificial Sequence: Synthetic polynucleotide"
atggccctccctgtcaccgccctgctgcttccgctggctcttctgctccacgccgctcggccccaagtccaactcgtccagtccggtgcagaagtcaagaaacccggagcttccgtgaaagtgtcctgcaaagcctccggttacacctttacgaactactggatgcattgggtgcgccaggccccgggacaggggctggaatggatgggcttcattacccccaccaccggataccccgagtacaatcagaagttcaaggaccgggtcaccatgaccgccgacaagtcaacctctactgcttacatggagctgtccagcctgcggtcggaagataccgccgtgtattactgcgcgagaaggaaagtcggaaagggagtgtactatgccctggactactggggacaggggaccactgtgactgtgtcaagcggaggcggaggctcggggggcggaggttcgggcggaggaggatcagggggcggcggttccgcgatccgcatgacccagagcccgttctccctgtccgcgtccgtgggggaccgcgtgactatcacgtgtcgggcctccgggaacatccacaactacctcgcatggtaccagcagaagccggccaaggcccctaagttgttcatctacaacaccaagactcttgccgacggagtgccgtcccggtttagcggaagcggttccggcaccgactacaccctgactatctcgagcctgcaaccagaagatttcgccacttactactgccagcacttctggtcgtccccttggacattcggcggcggcaccaaggtcgagattaagaccactaccccagcaccgaggccacccaccccggctcctaccatcgcctcccagcctctgtccctgcgtccggaggcatgtagacccgcagctggtggggccgtgcatacccggggtcttgacttcgcctgcgatatctacatttgggcccctctggctggtacttgcggggtcctgctgctttcactcgtgatcactctttactgtaagcgcggtcggaagaagctgctgtacatctttaagcaacccttcatgaggcctgtgcagactactcaagaggaggacggctgttcatgccggttcccagaggaggaggaaggcggctgcgaactgcgcgtgaaattcagccgcagcgcagatgctccagcctaccagcaggggcagaaccagctctacaacgaactcaatcttggtcggagagaggagtacgacgtgctggacaagcggagaggacgggacccagaaatgggcgggaagccgcgcagaaagaatccccaagagggcctgtacaacgagctccaaaaggataagatggcagaagcctatagcgagattggtatgaaaggggaacgcagaagaggcaaaggccacgacggactgtaccagggactcagcaccgccaccaaggacacctatgacgctcttcacatgcaggccctgccgcctcgg

SEQ ID NO: 2101 - DNA, 366 bp, Artificial Sequence
  source: /note="Description of Artificial Sequence: Synthetic polynucleotide"
caagtccaactcgtccaaagcggtgcagaagtcaagaagcccggttcctccgtgaaagtgtcctgcaaagcctcgggctacaccttcactaattactggatgcattgggtccgccaggcgcccggacagggattggaatggatggggttcatcacgccgaccaccggatacccggagtacaaccagaagttcaaggacagagtgaccattaccgccgataagtccacctccaccgcttacatggagctctcctcactgcggtccgaagatacagccgtgtactattgtgctcgccggaaagtcggaaagggagtgtactacgccctggactattggggccagggcaccaccgtgaccgtgtcctcg

SEQ ID NO: 2102 - DNA, 321 bp, Artificial Sequence
  source: /note="Description of Artificial Sequence: Synthetic polynucleotide"
gccattaggatgactcagtcccctttctccctctccgcgagcgtgggcgaccgcgtgacgatcacttgccgggcctcggggaacattcacaactacctggcctggtaccagcagaagccggccaaggcccctaagctgttcatctacaacaccaagacccttgcggacggagtgccatcgagattttccggctcgggctctgggaccgattacactctgactatctcaagcctgcaacctgaggacttcgccacttactactgccagcacttctggagcagcccctggactttcggtggcgggaccaaggtcgaaatcaag

SEQ ID NO: 2103 - protein, 249 aa, Artificial Sequence
  source: /note="Description of Artificial Sequence: Synthetic polypeptide"
QVQLVQSGAEVKKPGSSVKVSCKASGYTFTNYWMHWVRQAPGQGLEWMGFITPTTGYPEYNQKFKDRVTITADKSTSTAYMELSSLRSEDTAVYYCARRKVGKGVYYALDYWGQGTTVTVSSGGGGSGGGGSGGGGSGGGGSAIRMTQSPFSLSASVGDRVTITCRASGNIHNYLAWYQQKPAKAPKLFIYNTKTLADGVPSRFSGSGSGTDYTLTISSLQPEDFATYYCQHFWSSPWTFGGGTKVEIK

SEQ ID NO: 2104 - DNA, 747 bp, Artificial Sequence
  source: /note="Description of Artificial Sequence: Synthetic polynucleotide"
caagtccaactcgtccaaagcggtgcagaagtcaagaagcccggttcctccgtgaaagtgtcctgcaaagcctcgggctacaccttcactaattactggatgcattgggtccgccaggcgcccggacagggattggaatggatggggttcatcacgccgaccaccggatacccggagtacaaccagaagttcaaggacagagtgaccattaccgccgataagtccacctccaccgcttacatggagctctcctcactgcggtccgaagatacagccgtgtactattgtgctcgccggaaagtcggaaagggagtgtactacgccctggactattggggccagggcaccaccgtgaccgtgtcctcgggaggagggggttcgggcggaggcggctccggtggaggcggaagcggagggggcggatcagccattaggatgactcagtcccctttctccctctccgcgagcgtgggcgaccgcgtgacgatcacttgccgggcctcggggaacattcacaactacctggcctggtaccagcagaagccggccaaggcccctaagctgttcatctacaacaccaagacccttgcggacggagtgccatcgagattttccggctcgggctctgggaccgattacactctgactatctcaagcctgcaacctgaggacttcgccacttactactgccagcacttctggagcagcccctggactttcggtggcgggaccaaggtcgaaatcaag

SEQ ID NO: 2105 - protein, 493 aa, Artificial Sequence
  source: /note="Description of Artificial Sequence: Synthetic polypeptide"
MALPVTALLLPLALLLHAARPQVQLVQSGAEVKKPGSSVKVSCKASGYTFTNYWMHWVRQAPGQGLEWMGFITPTTGYPEYNQKFKDRVTITADKSTSTAYMELSSLRSEDTAVYYCARRKVGKGVYYALDYWGQGTTVTVSSGGGGSGGGGSGGGGSGGGGSAIRMTQSPFSLSASVGDRVTITCRASGNIHNYLAWYQQKPAKAPKLFIYNTKTLADGVPSRFSGSGSGTDYTLTISSLQPEDFATYYCQHFWSSPWTFGGGTKVEIKTTTPAPRPPTPAPTIASQPLSLRPEACRPAAGGAVHTRGLDFACDIYIWAPLAGTCGVLLLSLVITLYCKRGRKKLLYIFKQPFMRPVQTTQEEDGCSCRFPEEEEGGCELRVKFSRSADAPAYQQGQNQLYNELNLGRREEYDVLDKRRGRDPEMGGKPRRKNPQEGLYNELQKDKMAEAYSEIGMKGERRRGKGHDGLYQGLSTATKDTYDALHMQALPPR

SEQ ID NO: 2106 - DNA, 1479 bp, Artificial Sequence
  source: /note="Description of Artificial Sequence: Synthetic polynucleotide"
atggccctccctgtcaccgccctgctgcttccgctggctcttctgctccacgccgctcggccccaagtccaactcgtccaaagcggtgcagaagtcaagaagcccggttcctccgtgaaagtgtcctgcaaagcctcgggctacaccttcactaattactggatgcattgggtccgccaggcgcccggacagggattggaatggatggggttcatcacgccgaccaccggatacccggagtacaaccagaagttcaaggacagagtgaccattaccgccgataagtccacctccaccgcttacatggagctctcctcactgcggtccgaagatacagccgtgtactattgtgctcgccggaaagtcggaaagggagtgtactacgccctggactattggggccagggcaccaccgtgaccgtgtcctcgggaggagggggttcgggcggaggcggctccggtggaggcggaagcggagggggcggatcagccattaggatgactcagtcccctttctccctctccgcgagcgtgggcgaccgcgtgacgatcacttgccgggcctcggggaacattcacaactacctggcctggtaccagcagaagccggccaaggcccctaagctgttcatctacaacaccaagacccttgcggacggagtgccatcgagattttccggctcgggctctgggaccgattacactctgactatctcaagcctgcaacctgaggacttcgccacttactactgccagcacttctggagcagcccctggactttcggtggcgggaccaaggtcgaaatcaagaccactaccccagcaccgaggccacccaccccggctcctaccatcgcctcccagcctctgtccctgcgtccggaggcatgtagacccgcagctggtggggccgtgcatacccggggtcttgacttcgcctgcgatatctacatttgggcccctctggctggtacttgcggggtcctgctgctttcactcgtgatcactctttactgtaagcgcggtcggaagaagctgctgtacatctttaagcaacccttcatgaggcctgtgcagactactcaagaggaggacggctgttcatgccggttcccagaggaggaggaaggcggctgcgaactgcgcgtgaaattcagccgcagcgcagatgctccagcctaccagcaggggcagaaccagctctacaacgaactcaatcttggtcggagagaggagtacgacgtgctggacaagcggagaggacgggacccagaaatgggcgggaagccgcgcagaaagaatccccaagagggcctgtacaacgagctccaaaaggataagatggcagaagcctatagcgagattggtatgaaaggggaacgcagaagaggcaaaggccacgacggactgtaccagggactcagcaccgccaccaaggacacctatgacgctcttcacatgcaggccctgccgcctcgg

SEQ ID NO: 2107 - DNA, 366 bp, Artificial Sequence
  source: /note="Description of Artificial Sequence: Synthetic polynucleotide"
caagtccaactcgtccaatccggtgcagaagtcaagaaacccggtgcatccgtgaaagtgtcatgcaaagcctccgggtacaccttcactaactacaacctccactgggtccgccaggccccgggacagggactggagtggatgggggccatctacccgggaaactacgacacttcatacaaccagaagttcaagggcagagtgaccatgactgccgacaagagcacatcgaccgcctacatggaactcagctccctgcgctccgaggatactgccgtctactactgtgcccgggtggacttcggccactcccggtattggtatttcgatgtctggggacagggaaccaccgtgactgtgtccagc

SEQ ID NO: 2108 - protein, 106 aa, Artificial Sequence
  source: /note="Description of Artificial Sequence: Synthetic polypeptide"
EIVLTQSPATLSLSPGERATLSCRATSSVSSMNWYQQKPGQAPRPLIHATSNLASGIPARFSGSGSGTDYTLTISSLEPEDAAVYYCQQWTFNPPTFGQGTKLEIK

SEQ ID NO: 2109 - DNA, 318 bp, Artificial Sequence
  source: /note="Description of Artificial Sequence: Synthetic polynucleotide"
gaaatcgtgctgacccagtcccctgcgactctgagcctgagccctggggaacgcgccactttgtcatgccgggccacctcctccgtgtcctccatgaactggtaccagcagaagcccggacaggctccgcggccgctgatccatgccacctccaacctggccagcggcattcccgcgaggttttccggctcgggctctggtaccgactacaccctgaccatctcgagccttgagccagaagatgctgcggtgtactactgccaacagtggaccttcaatccgcctacgttcggacaggggaccaagctggagattaag

SEQ ID NO: 2110 - protein, 248 aa, Artificial Sequence
  source: /note="Description of Artificial Sequence: Synthetic polypeptide"
QVQLVQSGAEVKKPGASVKVSCKASGYTFTNYNLHWVRQAPGQGLEWMGAIYPGNYDTSYNQKFKGRVTMTADKSTSTAYMELSSLRSEDTAVYYCARVDFGHSRYWYFDVWGQGTTVTVSSGGGGSGGGGSGGGGSGGGGSEIVLTQSPATLSLSPGERATLSCRATSSVSSMNWYQQKPGQAPRPLIHATSNLASGIPARFSGSGSGTDYTLTISSLEPEDAAVYYCQQWTFNPPTFGQGTKLEIK

SEQ ID NO: 2111 - DNA, 744 bp, Artificial Sequence
  source: /note="Description of Artificial Sequence: Synthetic polynucleotide"
caagtccaactcgtccaatccggtgcagaagtcaagaaacccggtgcatccgtgaaagtgtcatgcaaagcctccgggtacaccttcactaactacaacctccactgggtccgccaggccccgggacagggactggagtggatgggggccatctacccgggaaactacgacacttcatacaaccagaagttcaagggcagagtgaccatgactgccgacaagagcacatcgaccgcctacatggaactcagctccctgcgctccgaggatactgccgtctactactgtgcccgggtggacttcggccactcccggtattggtatttcgatgtctggggacagggaaccaccgtgactgtgtccagcgggggcggaggatcgggtggcggaggttcggggggaggaggatcaggcggcggcggatcggaaatcgtgctgacccagtcccctgcgactctgagcctgagccctggggaacgcgccactttgtcatgccgggccacctcctccgtgtcctccatgaactggtaccagcagaagcccggacaggctccgcggccgctgatccatgccacctccaacctggccagcggcattcccgcgaggttttccggctcgggctctggtaccgactacaccctgaccatctcgagccttgagccagaagatgctgcggtgtactactgccaacagtggaccttcaatccgcctacgttcggacaggggaccaagctggagattaag

SEQ ID NO: 2112 - protein, 492 aa, Artificial Sequence
  source: /note="Description of Artificial Sequence: Synthetic polypeptide"
MALPVTALLLPLALLLHAARPQVQLVQSGAEVKKPGASVKVSCKASGYTFTNYNLHWVRQAPGQGLEWMGAIYPGNYDTSYNQKFKGRVTMTADKSTSTAYMELSSLRSEDTAVYYCARVDFGHSRYWYFDVWGQGTTVTVSSGGGGSGGGGSGGGGSGGGGSEIVLTQSPATLSLSPGERATLSCRATSSVSSMNWYQQKPGQAPRPLIHATSNLASGIPARFSGSGSGTDYTLTISSLEPEDAAVYYCQQWTFNPPTFGQGTKLEIKTTTPAPRPPTPAPTIASQPLSLRPEACRPAAGGAVHTRGLDFACDIYIWAPLAGTCGVLLLSLVITLYCKRGRKKLLYIFKQPFMRPVQTTQEEDGCSCRFPEEEEGGCELRVKFSRSADAPAYQQGQNQLYNELNLGRREEYDVLDKRRGRDPEMGGKPRRKNPQEGLYNELQKDKMAEAYSEIGMKGERRRGKGHDGLYQGLSTATKDTYDALHMQALPPR

SEQ ID NO: 2113 - DNA, 1476 bp, Artificial Sequence
  source: /note="Description of Artificial Sequence: Synthetic polynucleotide"
atggccctccctgtcaccgccctgctgcttccgctggctcttctgctccacgccgctcggccccaagtccaactcgtccaatccggtgcagaagtcaagaaacccggtgcatccgtgaaagtgtcatgcaaagcctccgggtacaccttcactaactacaacctccactgggtccgccaggccccgggacagggactggagtggatgggggccatctacccgggaaactacgacacttcatacaaccagaagttcaagggcagagtgaccatgactgccgacaagagcacatcgaccgcctacatggaactcagctccctgcgctccgaggatactgccgtctactactgtgcccgggtggacttcggccactcccggtattggtatttcgatgtctggggacagggaaccaccgtgactgtgtccagcgggggcggaggatcgggtggcggaggttcggggggaggaggatcaggcggcggcggatcggaaatcgtgctgacccagtcccctgcgactctgagcctgagccctggggaacgcgccactttgtcatgccgggccacctcctccgtgtcctccatgaactggtaccagcagaagcccggacaggctccgcggccgctgatccatgccacctccaacctggccagcggcattcccgcgaggttttccggctcgggctctggtaccgactacaccctgaccatctcgagccttgagccagaagatgctgcggtgtactactgccaacagtggaccttcaatccgcctacgttcggacaggggaccaagctggagattaagaccactaccccagcaccgaggccacccaccccggctcctaccatcgcctcccagcctctgtccctgcgtccggaggcatgtagacccgcagctggtggggccgtgcatacccggggtcttgacttcgcctgcgatatctacatttgggcccctctggctggtacttgcggggtcctgctgctttcactcgtgatcactctttactgtaagcgcggtcggaagaagctgctgtacatctttaagcaacccttcatgaggcctgtgcagactactcaagaggaggacggctgttcatgccggttcccagaggaggaggaaggcggctgcgaactgcgcgtgaaattcagccgcagcgcagatgctccagcctaccagcaggggcagaaccagctctacaacgaactcaatcttggtcggagagaggagtacgacgtgctggacaagcggagaggacgggacccagaaatgggcgggaagccgcgcagaaagaatccccaagagggcctgtacaacgagctccaaaaggataagatggcagaagcctatagcgagattggtatgaaaggggaacgcagaagaggcaaaggccacgacggactgtaccagggactcagcaccgccaccaaggacacctatgacgctcttcacatgcaggccctgccgcctcgg

SEQ ID NO: 2114 - DNA, 366 bp, Artificial Sequence
  source: /note="Description of Artificial Sequence: Synthetic polynucleotide"
caagtccaactcgtccagtcgggagcagaagtcaagaagcccggatcatccgtgaaagtgtcctgcaaagcctcaggctacacctttaccaactacaacttgcactgggtcagacaggccccgggacagggcctggagtggatgggcgccatctaccccggaaactatgacacctcgtacaaccagaagttcaagggtcgcgtgactatcacggctgacaagtccactagcaccgcgtacatggaactttcctcactgcggtccgaggatactgcggtgtactactgcgcccgggtggacttcggacactcgagatattggtacttcgatgtctggggacaggggaccaccgtgactgtgtcctcc

SEQ ID NO: 2115 - DNA, 318 bp, Artificial Sequence
  source: /note="Description of Artificial Sequence: Synthetic polynucleotide"
gaaattgtgctgacccagtctcccgcaaccctgtccctgagccctggagagcgcgccaccctgtcctgccgggccacatcctccgtgtcgtccatgaactggtaccagcagaagcccggccaagccccgaggcctctgattcatgctacctcaaatctggccagcggaatcccggcgcgcttctccggctcgggcagcggtactgactacactctcaccatctcgtccctcgaaccggaggacgccgccgtctactactgtcagcagtggaccttcaacccacctactttcggacaagggaccaagctggagatcaag

SEQ ID NO: 2116 - protein, 19 aa, Artificial Sequence
  source: /note="Description of Artificial Sequence: Synthetic peptide"
GGGSGGGGSGGGGSGGGGS

SEQ ID NO: 2117 - DNA, 744 bp, Artificial Sequence
  source: /note="Description of Artificial Sequence: Synthetic polynucleotide"
caagtccaactcgtccagtcgggagcagaagtcaagaagcccggatcatccgtgaaagtgtcctgcaaagcctcaggctacacctttaccaactacaacttgcactgggtcagacaggccccgggacagggcctggagtggatgggcgccatctaccccggaaactatgacacctcgtacaaccagaagttcaagggtcgcgtgactatcacggctgacaagtccactagcaccgcgtacatggaactttcctcactgcggtccgaggatactgcggtgtactactgcgcccgggtggacttcggacactcgagatattggtacttcgatgtctggggacaggggaccaccgtgactgtgtcctccgggggcggtggcagcgggggaggcggaagcggcggagggggttccgggggtggaggaagcgaaattgtgctgacccagtctcccgcaaccctgtccctgagccctggagagcgcgccaccctgtcctgccgggccacatcctccgtgtcgtccatgaactggtaccagcagaagcccggccaagccccgaggcctctgattcatgctacctcaaatctggccagcggaatcccggcgcgcttctccggctcgggcagcggtactgactacactctcaccatctcgtccctcgaaccggaggacgccgccgtctactactgtcagcagtggaccttcaacccacctactttcggacaagggaccaagctggagatcaag

SEQ ID NO: 2118 - protein, 492 aa, Artificial Sequence
  source: /note="Description of Artificial Sequence: Synthetic polypeptide"
MALPVTALLLPLALLLHAARPQVQLVQSGAEVKKPGSSVKVSCKASGYTFTNYNLHWVRQAPGQGLEWMGAIYPGNYDTSYNQKFKGRVTITADKSTSTAYMELSSLRSEDTAVYYCARVDFGHSRYWYFDVWGQGTTVTVSSGGGGSGGGGSGGGGSGGGGSEIVLTQSPATLSLSPGERATLSCRATSSVSSMNWYQQKPGQAPRPLIHATSNLASGIPARFSGSGSGTDYTLTISSLEPEDAAVYYCQQWTFNPPTFGQGTKLEIKTTTPAPRPPTPAPTIASQPLSLRPEACRPAAGGAVHTRGLDFACDIYIWAPLAGTCGVLLLSLVITLYCKRGRKKLLYIFKQPFMRPVQTTQEEDGCSCRFPEEEEGGCELRVKFSRSADAPAYQQGQNQLYNELNLGRREEYDVLDKRRGRDPEMGGKPRRKNPQEGLYNELQKDKMAEAYSEIGMKGERRRGKGHDGLYQGLSTATKDTYDALHMQALPPR

SEQ ID NO: 2119 - DNA, 1476 bp, Artificial Sequence
  source: /note="Description of Artificial Sequence: Synthetic polynucleotide"
atggccctccctgtcaccgccctgctgcttccgctggctcttctgctccacgccgctcggccccaagtccaactcgtccagtcgggagcagaagtcaagaagcccggatcatccgtgaaagtgtcctgcaaagcctcaggctacacctttaccaactacaacttgcactgggtcagacaggccccgggacagggcctggagtggatgggcgccatctaccccggaaactatgacacctcgtacaaccagaagttcaagggtcgcgtgactatcacggctgacaagtccactagcaccgcgtacatggaactttcctcactgcggtccgaggatactgcggtgtactactgcgcccgggtggacttcggacactcgagatattggtacttcgatgtctggggacaggggaccaccgtgactgtgtcctccgggggcggtggcagcgggggaggcggaagcggcggagggggttccgggggtggaggaagcgaaattgtgctgacccagtctcccgcaaccctgtccctgagccctggagagcgcgccaccctgtcctgccgggccacatcctccgtgtcgtccatgaactggtaccagcagaagcccggccaagccccgaggcctctgattcatgctacctcaaatctggccagcggaatcccggcgcgcttctccggctcgggcagcggtactgactacactctcaccatctcgtccctcgaaccggaggacgccgccgtctactactgtcagcagtggaccttcaacccacctactttcggacaagggaccaagctggagatcaagaccactaccccagcaccgaggccacccaccccggctcctaccatcgcctcccagcctctgtccctgcgtccggaggcatgtagacccgcagctggtggggccgtgcatacccggggtcttgacttcgcctgcgatatctacatttgggcccctctggctggtacttgcggggtcctgctgctttcactcgtgatcactctttactgtaagcgcggtcggaagaagctgctgtacatctttaagcaacccttcatgaggcctgtgcagactactcaagaggaggacggctgttcatgccggttcccagaggaggaggaaggcggctgcgaactgcgcgtgaaattcagccgcagcgcagatgctccagcctaccagcaggggcagaaccagctctacaacgaactcaatcttggtcggagagaggagtacgacgtgctggacaagcggagaggacgggacccagaaatgggcgggaagccgcgcagaaagaatccccaagagggcctgtacaacgagctccaaaaggataagatggcagaagcctatagcgagattggtatgaaaggggaacgcagaagaggcaaaggccacgacggactgtaccagggactcagcaccgccaccaaggacacctatgacgctcttcacatgcaggccctgccgcctcgg

SEQ ID NO: 2120 - protein, 122 aa, Artificial Sequence
  source: /note="Description of Artificial Sequence: Synthetic polypeptide"
QVQLVQSGAEVKKPGSSVKVSCKASGYTFTNYNLHWVRQAPGQGLEWMGAIYPGNYDTSYNQKFKGRVTITADKSTSTAYMELSSLRSEDTAVYYCARVDFGHSRYWYFDVWGQGTTVTVSS

SEQ ID NO: 2121 - protein, 248 aa, Artificial Sequence
  source: /note="Description of Artificial Sequence: Synthetic polypeptide"
QVQLVQSGAEVKKPGSSVKVSCKASGYTFTNYNLHWVRQAPGQGLEWMGAIYPGNYDTSYNQKFKGRVTITADKSTSTAYMELSSLRSEDTAVYYCARVDFGHSRYWYFDVWGQGTTVTVSSGGGGSGGGGSGGGGSGGGGSEIVLTQSPATLSLSPGERATLSCRATSSVSSMNWYQQKPGQAPRPLIHATSNLASGIPARFSGSGSGTDYTLTISSLEPEDAAVYYCQQWTFNPPTFGQGTKLEIK

SEQ ID NO: 2122 - DNA, 744 bp, Artificial Sequence
  source: /note="Description of Artificial Sequence: Synthetic polynucleotide"
caagtccaactcgtccaatccggcgcagaagtcaagaaaccaggatcgtccgtgaaagtgtcctgcaaggcgtccgggtacaccttcactaattacaacctccactgggtcagacaggccccaggacagggcctggaatggatgggcgccatctaccctggaaactacgatacctcgtacaaccagaagttcaagggccgcgtgactattaccgccgacaagagcacctccaccgcctatatggaactgtcgtccctgcggtccgaggacactgccgtgtactactgtgcaagggtggacttcggtcactcccggtattggtacttcgacgtctggggacaggggaccactgtgaccgtgtcgtcgggaggcggtggaagcggcggtggcggaagcggaggcggcggatcagggggcggaggaagcgacattcagcttacccagtcaccgtccttcctgagcgcctccgtgggagatcgcgtgaccatcacatgccgcgccacttcctcggtgtcctccatgaactggtaccagcagaagcccggaaaggctcctaagcctctgatccatgcgacctccaacttggcttccggggtgccgtcacggttcagcggcagcggttcaggaactgagtacaccctgactattagctctctccaacccgaggacttcgccacctactactgccagcagtggaccttcaacccgcccacgtttgggcagggtaccaagctggagatcaag

SEQ ID NO: 2123 - protein, 492 aa, Artificial Sequence
  source: /note="Description of Artificial Sequence: Synthetic polypeptide"
MALPVTALLLPLALLLHAARPQVQLVQSGAEVKKPGSSVKVSCKASGYTFTNYNLHWVRQAPGQGLEWMGAIYPGNYDTSYNQKFKGRVTITADKSTSTAYMELSSLRSEDTAVYYCARVDFGHSRYWYFDVWGQGTTVTVSSGGGGSGGGGSGGGGSGGGGSDIQLTQSPSFLSASVGDRVTITCRATSSVSSMNWYQQKPGKAPKPLIHATSNLASGVPSRFSGSGSGTEYTLTISSLQPEDFATYYCQQWTFNPPTFGQGTKLEIKTTTPAPRPPTPAPTIASQPLSLRPEACRPAAGGAVHTRGLDFACDIYIWAPLAGTCGVLLLSLVITLYCKRGRKKLLYIFKQPFMRPVQTTQEEDGCSCRFPEEEEGGCELRVKFSRSADAPAYQQGQNQLYNELNLGRREEYDVLDKRRGRDPEMGGKPRRKNPQEGLYNELQKDKMAEAYSEIGMKGERRRGKGHDGLYQGLSTATKDTYDALHMQALPPR

SEQ ID NO: 2124 - DNA, 1476 bp, Artificial Sequence
  source: /note="Description of Artificial Sequence: Synthetic polynucleotide"
atggccctccctgtcaccgccctgctgcttccgctggctcttctgctccacgccgctcggccccaagtccaactcgtccaatccggcgcagaagtcaagaaaccaggatcgtccgtgaaagtgtcctgcaaggcgtccgggtacaccttcactaattacaacctccactgggtcagacaggccccaggacagggcctggaatggatgggcgccatctaccctggaaactacgatacctcgtacaaccagaagttcaagggccgcgtgactattaccgccgacaagagcacctccaccgcctatatggaactgtcgtccctgcggtccgaggacactgccgtgtactactgtgcaagggtggacttcggtcactcccggtattggtacttcgacgtctggggacaggggaccactgtgaccgtgtcgtcgggaggcggtggaagcggcggtggcggaagcggaggcggcggatcagggggcggaggaagcgacattcagcttacccagtcaccgtccttcctgagcgcctccgtgggagatcgcgtgaccatcacatgccgcgccacttcctcggtgtcctccatgaactggtaccagcagaagcccggaaaggctcctaagcctctgatccatgcgacctccaacttggcttccggggtgccgtcacggttcagcggcagcggttcaggaactgagtacaccctgactattagctctctccaacccgaggacttcgccacctactactgccagcagtggaccttcaacccgcccacgtttgggcagggtaccaagctggagatcaagaccactaccccagcaccgaggccacccaccccggctcctaccatcgcctcccagcctctgtccctgcgtccggaggcatgtagacccgcagctggtggggccgtgcatacccggggtcttgacttcgcctgcgatatctacatttgggcccctctggctggtacttgcggggtcctgctgctttcactcgtgatcactctttactgtaagcgcggtcggaagaagctgctgtacatctttaagcaacccttcatgaggcctgtgcagactactcaagaggaggacggctgttcatgccggttcccagaggaggaggaaggcggctgcgaactgcgcgtgaaattcagccgcagcgcagatgctccagcctaccagcaggggcagaaccagctctacaacgaactcaatcttggtcggagagaggagtacgacgtgctggacaagcggagaggacgggacccagaaatgggcgggaagccgcgcagaaagaatccccaagagggcctgtacaacgagctccaaaaggataagatggcagaagcctatagcgagattggtatgaaaggggaacgcagaagaggcaaaggccacgacggactgtaccagggactcagcaccgccaccaaggacacctatgacgctcttcacatgcaggccctgccgcctcgg

SEQ ID NO: 2125 - DNA, 366 bp, Artificial Sequence
  source: /note="Description of Artificial Sequence: Synthetic polynucleotide"
caagtccaactcgtccagtcaggagcagaagtcaagaaacctggagcttccgtgaaagtgtcgtgcaaggcctccggctacaccttcacctcttacaacatgcactgggtcagacaggcccctggtcaaggactggaatggatgggagcgatctacccgggcaacggagacacttcgtacaaccccaagttcaagggacgggtcactatgaccgccgataagagcacgcgcaccgcgtacatggaactgagcagcctgcgctccgaggacactgccgtgtattactgcgcgaggagctacttctacggatcatcgtcgtggtacttcgacgtctggggccagggcaccaccgtgaccgtgtcatcc

SEQ ID NO: 2126 - protein, 106 aa, Artificial Sequence
  source: /note="Description of Artificial Sequence: Synthetic polypeptide"
DIQLTQSPSFLSASVGDRVTITCRASSSVSSMHWYQQKPGKAPKPLIFATSNLASGVPSRFSGSGSGTEYTLTISSLQPEDFATYYCQQWIFNPPTFGGGTKVEIK

SEQ ID NO: 2127 - DNA, 318 bp, Artificial Sequence
  source: /note="Description of Artificial Sequence: Synthetic polynucleotide"
gatattcagctgacccagagcccgtcattcctgtccgcctccgtgggagacagagtgaccatcacttgtcgggccagctcctcggtgtcctccatgcattggtatcagcagaagcctgggaaggctcccaagcccctcatcttcgccacatcaaatcttgcctccggggtgccaagccggttctccgggagcggctccggtactgagtacactctgaccatttcctccttgcaacccgaggactttgccacctactactgccagcagtggatctttaacccgccgaccttcggaggaggaaccaaagtggagatcaag

SEQ ID NO: 2128 - protein, 248 aa, Artificial Sequence
  source: /note="Description of Artificial Sequence: Synthetic polypeptide"
QVQLVQSGAEVKKPGASVKVSCKASGYTFTSYNMHWVRQAPGQGLEWMGAIYPGNGDTSYNPKFKGRVTMTADKSTRTAYMELSSLRSEDTAVYYCARSYFYGSSSWYFDVWGQGTTVTVSSGGGGSGGGGSGGGGSGGGGSDIQLTQSPSFLSASVGDRVTITCRASSSVSSMHWYQQKPGKAPKPLIFATSNLASGVPSRFSGSGSGTEYTLTISSLQPEDFATYYCQQWIFNPPTFGGGTKVEIK

SEQ ID NO: 2129 - DNA, 744 bp, Artificial Sequence
  source: /note="Description of Artificial Sequence: Synthetic polynucleotide"
caagtccaactcgtccagtcaggagcagaagtcaagaaacctggagcttccgtgaaagtgtcgtgcaaggcctccggctacaccttcacctcttacaacatgcactgggtcagacaggcccctggtcaaggactggaatggatgggagcgatctacccgggcaacggagacacttcgtacaaccccaagttcaagggacgggtcactatgaccgccgataagagcacgcgcaccgcgtacatggaactgagcagcctgcgctccgaggacactgccgtgtattactgcgcgaggagctacttctacggatcatcgtcgtggtacttcgacgtctggggccagggcaccaccgtgaccgtgtcatccggtggcggaggatcggggggcggaggaagcggcggggggggctccggcggtggaggctcggatattcagctgacccagagcccgtcattcctgtccgcctccgtgggagacagagtgaccatcacttgtcgggccagctcctcggtgtcctccatgcattggtatcagcagaagcctgggaaggctcccaagcccctcatcttcgccacatcaaatcttgcctccggggtgccaagccggttctccgggagcggctccggtactgagtacactctgaccatttcctccttgcaacccgaggactttgccacctactactgccagcagtggatctttaacccgccgaccttcggaggaggaaccaaagtggagatcaag

SEQ ID NO: 2130 - protein, 492 aa, Artificial Sequence
  source: /note="Description of Artificial Sequence: Synthetic polypeptide"
MALPVTALLLPLALLLHAARPQVQLVQSGAEVKKPGASVKVSCKASGYTFTSYNMHWVRQAPGQGLEWMGAIYPGNGDTSYNPKFKGRVTMTADKSTRTAYMELSSLRSEDTAVYYCARSYFYGSSSWYFDVWGQGTTVTVSSGGGGSGGGGSGGGGSGGGGSDIQLTQSPSFLSASVGDRVTITCRASSSVSSMHWYQQKPGKAPKPLIFATSNLASGVPSRFSGSGSGTEYTLTISSLQPEDFATYYCQQWIFNPPTFGGGTKVEIKTTTPAPRPPTPAPTIASQPLSLRPEACRPAAGGAVHTRGLDFACDIYIWAPLAGTCGVLLLSLVITLYCKRGRKKLLYIFKQPFMRPVQTTQEEDGCSCRFPEEEEGGCELRVKFSRSADAPAYQQGQNQLYNELNLGRREEYDVLDKRRGRDPEMGGKPRRKNPQEGLYNELQKDKMAEAYSEIGMKGERRRGKGHDGLYQGLSTATKDTYDALHMQALPPR

SEQ ID NO: 2131 - DNA, 1476 bp, Artificial Sequence
  source: /note="Description of Artificial Sequence: Synthetic polynucleotide"
atggccctccctgtcaccgccctgctgcttccgctggctcttctgctccacgccgctcggccccaagtccaactcgtccagtcaggagcagaagtcaagaaacctggagcttccgtgaaagtgtcgtgcaaggcctccggctacaccttcacctcttacaacatgcactgggtcagacaggcccctggtcaaggactggaatggatgggagcgatctacccgggcaacggagacacttcgtacaaccccaagttcaagggacgggtcactatgaccgccgataagagcacgcgcaccgcgtacatggaactgagcagcctgcgctccgaggacactgccgtgtattactgcgcgaggagctacttctacggatcatcgtcgtggtacttcgacgtctggggccagggcaccaccgtgaccgtgtcatccggtggcggaggatcggggggcggaggaagcggcggggggggctccggcggtggaggctcggatattcagctgacccagagcccgtcattcctgtccgcctccgtgggagacagagtgaccatcacttgtcgggccagctcctcggtgtcctccatgcattggtatcagcagaagcctgggaaggctcccaagcccctcatcttcgccacatcaaatcttgcctccggggtgccaagccggttctccgggagcggctccggtactgagtacactctgaccatttcctccttgcaacccgaggactttgccacctactactgccagcagtggatctttaacccgccgaccttcggaggaggaaccaaagtggagatcaagaccactaccccagcaccgaggccacccaccccggctcctaccatcgcctcccagcctctgtccctgcgtccggaggcatgtagacccgcagctggtggggccgtgcatacccggggtcttgacttcgcctgcgatatctacatttgggcccctctggctggtacttgcggggtcctgctgctttcactcgtgatcactctttactgtaagcgcggtcggaagaagctgctgtacatctttaagcaacccttcatgaggcctgtgcagactactcaagaggaggacggctgttcatgccggttcccagaggaggaggaaggcggctgcgaactgcgcgtgaaattcagccgcagcgcagatgctccagcctaccagcaggggcagaaccagctctacaacgaactcaatcttggtcggagagaggagtacgacgtgctggacaagcggagaggacgggacccagaaatgggcgggaagccgcgcagaaagaatccccaagagggcctgtacaacgagctccaaaaggataagatggcagaagcctatagcgagattggtatgaaaggggaacgcagaagaggcaaaggccacgacggactgtaccagggactcagcaccgccaccaaggacacctatgacgctcttcacatgcaggccctgccgcctcgg

SEQ ID NO: 2132 - protein, 122 aa, Artificial Sequence
  source: /note="Description of Artificial Sequence: Synthetic polypeptide"
QVQLVQSGAEVKKPGSSVKVSCKASGYTFTSYNMHWVRQAPGQGLEWMGAIYPGNGDTSYNPKFKGRVTITADKSTRTAYMELSSLRSEDTAVYYCARSYFYGSSSWYFDVWGQGTTVTVSS

SEQ ID NO: 2133 - DNA, 366 bp, Artificial Sequence
  source: /note="Description of Artificial Sequence: Synthetic polynucleotide"
caagtgcaactcgtccagtccggtgcagaagtcaagaagcctggttcatcggtgaaagtgtcctgcaaagcgtcgggctacaccttcacctcgtacaacatgcactgggtccgccaggcccccggacaaggactggaatggatgggtgctatctaccccggaaacggagataccagctacaaccccaagttcaagggacgcgtgaccattactgccgacaagtccacaagaaccgcctacatggaactgtccagcctgagatccgaggacactgcggtgtactactgtgcgaggtcctacttctacgggtcctcctcttggtacttcgacgtctggggacagggcactactgtgaccgtgtccagc

SEQ ID NO: 2134 - DNA, 318 bp, Artificial Sequence
  source: /note="Description of Artificial Sequence: Synthetic polynucleotide"
gagatcgtgctgacgcagtcgccggccaccctgagcctttcaccgggagaacgcgccactctgtcatgccgggccagcagctccgtgtcctccatgcattggtaccagcagaagccggggcaggccccgcggcctctcatcttcgccacctccaatctggcctccggcatccctgctcggtttagcggaagcggcagcggaactgactataccttgaccatctcctcgctggaaccagaggatgcagccgtgtactattgccagcagtggatcttcaacccgccaaccttcggcggcggcaccaaggtcgagattaag

SEQ ID NO: 2135 - protein, 248 aa, Artificial Sequence
  source: /note="Description of Artificial Sequence: Synthetic polypeptide"
QVQLVQSGAEVKKPGSSVKVSCKASGYTFTSYNMHWVRQAPGQGLEWMGAIYPGNGDTSYNPKFKGRVTITADKSTRTAYMELSSLRSEDTAVYYCARSYFYGSSSWYFDVWGQGTTVTVSSGGGGSGGGGSGGGGSGGGGSEIVLTQSPATLSLSPGERATLSCRASSSVSSMHWYQQKPGQAPRPLIFATSNLASGIPARFSGSGSGTDYTLTISSLEPEDAAVYYCQQWIFNPPTFGGGTKVEIK

SEQ ID NO: 2136 - DNA, 744 bp, Artificial Sequence
  source: /note="Description of Artificial Sequence: Synthetic polynucleotide"
caagtgcaactcgtccagtccggtgcagaagtcaagaagcctggttcatcggtgaaagtgtcctgcaaagcgtcgggctacaccttcacctcgtacaacatgcactgggtccgccaggcccccggacaaggactggaatggatgggtgctatctaccccggaaacggagataccagctacaaccccaagttcaagggacgcgtgaccattactgccgacaagtccacaagaaccgcctacatggaactgtccagcctgagatccgaggacactgcggtgtactactgtgcgaggtcctacttctacgggtcctcctcttggtacttcgacgtctggggacagggcactactgtgaccgtgtccagcgggggaggcggtagcggggggggtggatcgggcggcggcggatcaggaggaggagggtccgagatcgtgctgacgcagtcgccggccaccctgagcctttcaccgggagaacgcgccactctgtcatgccgggccagcagctccgtgtcctccatgcattggtaccagcagaagccggggcaggccccgcggcctctcatcttcgccacctccaatctggcctccggcatccctgctcggtttagcggaagcggcagcggaactgactataccttgaccatctcctcgctggaaccagaggatgcagccgtgtactattgccagcagtggatcttcaacccgccaaccttcggcggcggcaccaaggtcgagattaag

SEQ ID NO: 2137 - protein, 492 aa, Artificial Sequence
  source: /note="Description of Artificial Sequence: Synthetic polypeptide"
MALPVTALLLPLALLLHAARPQVQLVQSGAEVKKPGSSVKVSCKASGYTFTSYNMHWVRQAPGQGLEWMGAIYPGNGDTSYNPKFKGRVTITADKSTRTAYMELSSLRSEDTAVYYCARSYFYGSSSWYFDVWGQGTTVTVSSGGGGSGGGGSGGGGSGGGGSEIVLTQSPATLSLSPGERATLSCRASSSVSSMHWYQQKPGQAPRPLIFATSNLASGIPARFSGSGSGTDYTLTISSLEPEDAAVYYCQQWIFNPPTFGGGTKVEIKTTTPAPRPPTPAPTIASQPLSLRPEACRPAAGGAVHTRGLDFACDIYIWAPLAGTCGVLLLSLVITLYCKRGRKKLLYIFKQPFMRPVQTTQEEDGCSCRFPEEEEGGCELRVKFSRSADAPAYQQGQNQLYNELNLGRREEYDVLDKRRGRDPEMGGKPRRKNPQEGLYNELQKDKMAEAYSEIGMKGERRRGKGHDGLYQGLSTATKDTYDALHMQALPPR

SEQ ID NO: 2138 - DNA, 1476 bp, Artificial Sequence
  source: /note="Description of Artificial Sequence: Synthetic polynucleotide"
atggccctccctgtcaccgccctgctgcttccgctggctcttctgctccacgccgctcggccccaagtgcaactcgtccagtccggtgcagaagtcaagaagcctggttcatcggtgaaagtgtcctgcaaagcgtcgggctacaccttcacctcgtacaacatgcactgggtccgccaggcccccggacaaggactggaatggatgggtgctatctaccccggaaacggagataccagctacaaccccaagttcaagggacgcgtgaccattactgccgacaagtccacaagaaccgcctacatggaactgtccagcctgagatccgaggacactgcggtgtactactgtgcgaggtcctacttctacgggtcctcctcttggtacttcgacgtctggggacagggcactactgtgaccgtgtccagcgggggaggcggtagcggggggggtggatcgggcggcggcggatcaggaggaggagggtccgagatcgtgctgacgcagtcgccggccaccctgagcctttcaccgggagaacgcgccactctgtcatgccgggccagcagctccgtgtcctccatgcattggtaccagcagaagccggggcaggccccgcggcctctcatcttcgccacctccaatctggcctccggcatccctgctcggtttagcggaagcggcagcggaactgactataccttgaccatctcctcgctggaaccagaggatgcagccgtgtactattgccagcagtggatcttcaacccgccaaccttcggcggcggcaccaaggtcgagattaagaccactaccccagcaccgaggccacccaccccggctcctaccatcgcctcccagcctctgtccctgcgtccggaggcatgtagacccgcagctggtggggccgtgcatacccggggtcttgacttcgcctgcgatatctacatttgggcccctctggctggtacttgcggggtcctgctgctttcactcgtgatcactctttactgtaagcgcggtcggaagaagctgctgtacatctttaagcaacccttcatgaggcctgtgcagactactcaagaggaggacggctgttcatgccggttcccagaggaggaggaaggcggctgcgaactgcgcgtgaaattcagccgcagcgcagatgctccagcctaccagcaggggcagaaccagctctacaacgaactcaatcttggtcggagagaggagtacgacgtgctggacaagcggagaggacgggacccagaaatgggcgggaagccgcgcagaaagaatccccaagagggcctgtacaacgagctccaaaaggataagatggcagaagcctatagcgagattggtatgaaaggggaacgcagaagaggcaaaggccacgacggactgtaccagggactcagcaccgccaccaaggacacctatgacgctcttcacatgcaggccctgccgcctcgg

SEQ ID NO: 2139 - DNA, 366 bp, Artificial Sequence
  source: /note="Description of Artificial Sequence: Synthetic polynucleotide"
caagtgcaactcgtccagtccggtgcagaagtcaagaagccaggttcctcggtgaaagtgtcctgcaaagcctcgggttacaccttcacctcgtacaatatgcactgggtccgccaagctccgggacaaggcctggaatggatgggagcgatctaccccggaaacggcgacacgtcctacaacccgaagttcaagggaagagtgaccatcaccgccgacaagtccacccgcaccgcgtacatggagcttagcagcctgcggagcgaggacactgccgtgtattactgcgcccggtcctacttctatggatcatcctcgtggtacttcgatgtctggggccaggggaccaccgtgaccgtgtccagc

SEQ ID NO: 2140 - DNA, 318 bp, Artificial Sequence
  source: /note="Description of Artificial Sequence: Synthetic polynucleotide"
gatatccagctgacccagagcccttccttcctgtccgcttccgtgggagacagagtcactattacttgtcgggcctcctcatccgtgtcatccatgcactggtaccagcagaagccgggaaaggccccaaagcccttgatctttgccacttccaacctggcatccggcgtgccctcgaggttctccgggagcggttcagggaccgagtacactctgaccattagcagcctccagcctgaggactttgccacctactactgccagcagtggattttcaacccgcctacattcggagggggcactaaggtcgaaatcaag

SEQ ID NO: 2141 - protein, 248 aa, Artificial Sequence
  source: /note="Description of Artificial Sequence: Synthetic polypeptide"
QVQLVQSGAEVKKPGSSVKVSCKASGYTFTSYNMHWVRQAPGQGLEWMGAIYPGNGDTSYNPKFKGRVTITADKSTRTAYMELSSLRSEDTAVYYCARSYFYGSSSWYFDVWGQGTTVTVSSGGGGSGGGGSGGGGSGGGGSDIQLTQSPSFLSASVGDRVTITCRASSSVSSMHWYQQKPGKAPKPLIFATSNLASGVPSRFSGSGSGTEYTLTISSLQPEDFATYYCQQWIFNPPTFGGGTKVEIK

SEQ ID NO: 2142 - DNA, 744 bp, Artificial Sequence
  source: /note="Description of Artificial Sequence: Synthetic polynucleotide"
caagtgcaactcgtccagtccggtgcagaagtcaagaagccaggttcctcggtgaaagtgtcctgcaaagcctcgggttacaccttcacctcgtacaatatgcactgggtccgccaagctccgggacaaggcctggaatggatgggagcgatctaccccggaaacggcgacacgtcctacaacccgaagttcaagggaagagtgaccatcaccgccgacaagtccacccgcaccgcgtacatggagcttagcagcctgcggagcgaggacactgccgtgtattactgcgcccggtcctacttctatggatcatcctcgtggtacttcgatgtctggggccaggggaccaccgtgaccgtgtccagcggtggcggaggcagcggcggaggagggtctggaggaggcggctcggggggagggggctcggatatccagctgacccagagcccttccttcctgtccgcttccgtgggagacagagtcactattacttgtcgggcctcctcatccgtgtcatccatgcactggtaccagcagaagccgggaaaggccccaaagcccttgatctttgccacttccaacctggcatccggcgtgccctcgaggttctccgggagcggttcagggaccgagtacactctgaccattagcagcctccagcctgaggactttgccacctactactgccagcagtggattttcaacccgcctacattcggagggggcactaaggtcgaaatcaag

SEQ ID NO: 2143 - protein, 492 aa, Artificial Sequence
  source: /note="Description of Artificial Sequence: Synthetic polypeptide"
MALPVTALLLPLALLLHAARPQVQLVQSGAEVKKPGSSVKVSCKASGYTFTSYNMHWVRQAPGQGLEWMGAIYPGNGDTSYNPKFKGRVTITADKSTRTAYMELSSLRSEDTAVYYCARSYFYGSSSWYFDVWGQGTTVTVSSGGGGSGGGGSGGGGSGGGGSDIQLTQSPSFLSASVGDRVTITCRASSSVSSMHWYQQKPGKAPKPLIFATSNLASGVPSRFSGSGSGTEYTLTISSLQPEDFATYYCQQWIFNPPTFGGGTKVEIKTTTPAPRPPTPAPTIASQPLSLRPEACRPAAGGAVHTRGLDFACDIYIWAPLAGTCGVLLLSLVITLYCKRGRKKLLYIFKQPFMRPVQTTQEEDGCSCRFPEEEEGGCELRVKFSRSADAPAYQQGQNQLYNELNLGRREEYDVLDKRRGRDPEMGGKPRRKNPQEGLYNELQKDKMAEAYSEIGMKGERRRGKGHDGLYQGLSTATKDTYDALHMQALPPR

SEQ ID NO: 2144 - DNA, 1476 bp, Artificial Sequence
  source: /note="Description of Artificial Sequence: Synthetic polynucleotide"
atggccctccctgtcaccgccctgctgcttccgctggctcttctgctccacgccgctcggccccaagtgcaactcgtccagtccggtgcagaagtcaagaagccaggttcctcggtgaaagtgtcctgcaaagcctcgggttacaccttcacctcgtacaatatgcactgggtccgccaagctccgggacaaggcctggaatggatgggagcgatctaccccggaaacggcgacacgtcctacaacccgaagttcaagggaagagtgaccatcaccgccgacaagtccacccgcaccgcgtacatggagcttagcagcctgcggagcgaggacactgccgtgtattactgcgcccggtcctacttctatggatcatcctcgtggtacttcgatgtctggggccaggggaccaccgtgaccgtgtccagcggtggcggaggcagcggcggaggagggtctggaggaggcggctcggggggagggggctcggatatccagctgacccagagcccttccttcctgtccgcttccgtgggagacagagtcactattacttgtcgggcctcctcatccgtgtcatccatgcactggtaccagcagaagccgggaaaggccccaaagcccttgatctttgccacttccaacctggcatccggcgtgccctcgaggttctccgggagcggttcagggaccgagtacactctgaccattagcagcctccagcctgaggactttgccacctactactgccagcagtggattttcaacccgcctacattcggagggggcactaaggtcgaaatcaagaccactaccccagcaccgaggccacccaccccggctcctaccatcgcctcccagcctctgtccctgcgtccggaggcatgtagacccgcagctggtggggccgtgcatacccggggtcttgacttcgcctgcgatatctacatttgggcccctctggctggtacttgcggggtcctgctgctttcactcgtgatcactctttactgtaagcgcggtcggaagaagctgctgtacatctttaagcaacccttcatgaggcctgtgcagactactcaagaggaggacggctgttcatgccggttcccagaggaggaggaaggcggctgcgaactgcgcgtgaaattcagccgcagcgcagatgctccagcctaccagcaggggcagaaccagctctacaacgaactcaatcttggtcggagagaggagtacgacgtgctggacaagcggagaggacgggacccagaaatgggcgggaagccgcgcagaaagaatccccaagagggcctgtacaacgagctccaaaaggataagatggcagaagcctatagcgagattggtatgaaaggggaacgcagaagaggcaaaggccacgacggactgtaccagggactcagcaccgccaccaaggacacctatgacgctcttcacatgcaggccctgccgcctcgg

SEQ ID NO: 2145 - protein, 5 aa, Artificial Sequence
  source: /note="Description of Artificial Sequence: Synthetic peptide"
RYNMH

SEQ ID NO: 2146 - protein, 17 aa, Artificial Sequence
  source: /note="Description of Artificial Sequence: Synthetic peptide"
AIYPGNGDTSYSQKFKG

SEQ ID NO: 2147 - protein, 13 aa, Artificial Sequence
  source: /note="Description of Artificial Sequence: Synthetic peptide"
SFFYGSSDWYFDV

SEQ ID NO: 2148 - protein, 7 aa, Artificial Sequence
  source: /note="Description of Artificial Sequence: Synthetic peptide"
GYTFTRY

SEQ ID NO: 2149 - protein, 8 aa, Artificial Sequence
  source: /note="Description of Artificial Sequence: Synthetic peptide"
GYTFTRYN

SEQ ID NO: 2150 - protein, 15 aa, Artificial Sequence
  source: /note="Description of Artificial Sequence: Synthetic peptide"
ARSFFYGSSDWYFDV

SEQ ID NO: 2151 - protein, 10 aa, Artificial Sequence
  source: /note="Description of Artificial Sequence: Synthetic peptide"
GYTFTRYNMH

SEQ ID NO: 2152 - protein, 122 aa, Artificial Sequence
  source: /note="Description of Artificial Sequence: Synthetic polypeptide"
QVQLVQSGAEVKKPGASVKVSCKASGYTFTRYNMHWVRQAPGQRLEWMGAIYPGNGDTSYSQKFKGRVTITADKSASTAYMELSSLRSEDTAVYYCARSFFYGSSDWYFDVWGQGTTVTVSS

SEQ ID NO: 2153 - DNA, 366 bp, Artificial Sequence
  source: /note="Description of Artificial Sequence: Synthetic polynucleotide"
caagtccaactcgtccagtcaggagcagaagtcaagaaaccaggagcatccgtgaaagtgtcgtgcaaagcctctggctacaccttcacccggtacaacatgcactgggtcagacaggccccgggacagcggctcgagtggatgggtgccatctaccccggcaacggggacacctcctactcccaaaagttcaagggtcgcgtgaccatcacggcggataagtcggccagcactgcgtacatggaattgtcatccctgcgctccgaggataccgccgtgtattactgcgcgcggtccttcttctacggctcctccgattggtacttcgacgtctggggacagggaactaccgtgaccgtgtcctcc

SEQ ID NO: 2154 - protein, 10 aa, Artificial Sequence
  source: /note="Description of Artificial Sequence: Synthetic peptide"
RASSSVNNMH

SEQ ID NO: 2155 - protein, 6 aa, Artificial Sequence
  source: /note="Description of Artificial Sequence: Synthetic peptide"
SSSVNN

SEQ ID NO: 2156 - protein, 5 aa, Artificial Sequence
  source: /note="Description of Artificial Sequence: Synthetic peptide"
SSVNN

SEQ ID NO: 2157 - protein, 106 aa, Artificial Sequence
  source: /note="Description of Artificial Sequence: Synthetic polypeptide"
EIVLTQSPDFQSVTPKEKVTITCRASSSVNNMHWYQQKPDQSPKPLIYATSNLASGVPSRFSGSGSGTDYTLTINSLEAEDAATYYCQQWIFNPPTFGQGTKLEIK

SEQ ID NO: 2158 - DNA, 318 bp, Artificial Sequence
  source: /note="Description of Artificial Sequence: Synthetic polynucleotide"
gaaatcgtgctgactcagtcgccggacttccaaagcgtgaccccaaaggagaaggtcaccatcacctgtagagcctcatcgtccgtgaacaatatgcactggtaccagcagaagccggaccagtcccctaagcccctgatctacgccacttccaacctggcctccggcgtgccgtcgaggttcagcggctcgggcagcgggaccgactacaccctgaccatcaacagccttgaagctgaggacgccgctacctactactgccagcagtggattttcaaccctcccacatttggacagggcactaagctggagattaag

SEQ ID NO: 2159 - protein, 248 aa, Artificial Sequence
  source: /note="Description of Artificial Sequence: Synthetic polypeptide"
QVQLVQSGAEVKKPGASVKVSCKASGYTFTRYNMHWVRQAPGQRLEWMGAIYPGNGDTSYSQKFKGRVTITADKSASTAYMELSSLRSEDTAVYYCARSFFYGSSDWYFDVWGQGTTVTVSSGGGGSGGGGSGGGGSGGGGSEIVLTQSPDFQSVTPKEKVTITCRASSSVNNMHWYQQKPDQSPKPLIYATSNLASGVPSRFSGSGSGTDYTLTINSLEAEDAATYYCQQWIFNPPTFGQGTKLEIK

SEQ ID NO: 2160 - DNA, 744 bp, Artificial Sequence
  source: /note="Description of Artificial Sequence: Synthetic polynucleotide"
caagtccaactcgtccagtcaggagcagaagtcaagaaaccaggagcatccgtgaaagtgtcgtgcaaagcctctggctacaccttcacccggtacaacatgcactgggtcagacaggccccgggacagcggctcgagtggatgggtgccatctaccccggcaacggggacacctcctactcccaaaagttcaagggtcgcgtgaccatcacggcggataagtcggccagcactgcgtacatggaattgtcatccctgcgctccgaggataccgccgtgtattactgcgcgcggtccttcttctacggctcctccgattggtacttcgacgtctggggacagggaactaccgtgaccgtgtcctccgggggtggcgggagcggagggggcggaagcgggggtggaggatcaggaggcggaggctccgaaatcgtgctgactcagtcgccggacttccaaagcgtgaccccaaaggagaaggtcaccatcacctgtagagcctcatcgtccgtgaacaatatgcactggtaccagcagaagccggaccagtcccctaagcccctgatctacgccacttccaacctggcctccggcgtgccgtcgaggttcagcggctcgggcagcgggaccgactacaccctgaccatcaacagccttgaagctgaggacgccgctacctactactgccagcagtggattttcaaccctcccacatttggacagggcactaagctggagattaag

SEQ ID NO: 2161 - protein, 492 aa, Artificial Sequence
  source: /note="Description of Artificial Sequence: Synthetic polypeptide"
MALPVTALLLPLALLLHAARPQVQLVQSGAEVKKPGASVKVSCKASGYTFTRYNMHWVRQAPGQRLEWMGAIYPGNGDTSYSQKFKGRVTITADKSASTAYMELSSLRSEDTAVYYCARSFFYGSSDWYFDVWGQGTTVTVSSGGGGSGGGGSGGGGSGGGGSEIVLTQSPDFQSVTPKEKVTITCRASSSVNNMHWYQQKPDQSPKPLIYATSNLASGVPSRFSGSGSGTDYTLTINSLEAEDAATYYCQQWIFNPPTFGQGTKLEIKTTTPAPRPPTPAPTIASQPLSLRPEACRPAAGGAVHTRGLDFACDIYIWAPLAGTCGVLLLSLVITLYCKRGRKKLLYIFKQPFMRPVQTTQEEDGCSCRFPEEEEGGCELRVKFSRSADAPAYQQGQNQLYNELNLGRREEYDVLDKRRGRDPEMGGKPRRKNPQEGLYNELQKDKMAEAYSEIGMKGERRRGKGHDGLYQGLSTATKDTYDALHMQALPPR

SEQ ID NO: 2162 - DNA, 1476 bp, Artificial Sequence
  source: /note="Description of Artificial Sequence: Synthetic polynucleotide"
atggccctccctgtcaccgccctgctgcttccgctggctcttctgctccacgccgctcggccccaagtccaactcgtccagtcaggagcagaagtcaagaaaccaggagcatccgtgaaagtgtcgtgcaaagcctctggctacaccttcacccggtacaacatgcactgggtcagacaggccccgggacagcggctcgagtggatgggtgccatctaccccggcaacggggacacctcctactcccaaaagttcaagggtcgcgtgaccatcacggcggataagtcggccagcactgcgtacatggaattgtcatccctgcgctccgaggataccgccgtgtattactgcgcgcggtccttcttctacggctcctccgattggtacttcgacgtctggggacagggaactaccgtgaccgtgtcctccgggggtggcgggagcggagggggcggaagcgggggtggaggatcaggaggcggaggctccgaaatcgtgctgactcagtcgccggacttccaaagcgtgaccccaaaggagaaggtcaccatcacctgtagagcctcatcgtccgtgaacaatatgcactggtaccagcagaagccggaccagtcccctaagcccctgatctacgccacttccaacctggcctccggcgtgccgtcgaggttcagcggctcgggcagcgggaccgactacaccctgaccatcaacagccttgaagctgaggacgccgctacctactactgccagcagtggattttcaaccctcccacatttggacagggcactaagctggagattaagaccactaccccagcaccgaggccacccaccccggctcctaccatcgcctcccagcctctgtccctgcgtccggaggcatgtagacccgcagctggtggggccgtgcatacccggggtcttgacttcgcctgcgatatctacatttgggcccctctggctggtacttgcggggtcctgctgctttcactcgtgatcactctttactgtaagcgcggtcggaagaagctgctgtacatctttaagcaacccttcatgaggcctgtgcagactactcaagaggaggacggctgttcatgccggttcccagaggaggaggaaggcggctgcgaactgcgcgtgaaattcagccgcagcgcagatgctccagcctaccagcaggggcagaaccagctctacaacgaactcaatcttggtcggagagaggagtacgacgtgctggacaagcggagaggacgggacccagaaatgggcgggaagccgcgcagaaagaatccccaagagggcctgtacaacgagctccaaaaggataagatggcagaagcctatagcgagattggtatgaaaggggaacgcagaagaggcaaaggccacgacggactgtaccagggactcagcaccgccaccaaggacacctatgacgctcttcacatgcaggccctgccgcctcgg

SEQ ID NO: 2163 - DNA, 366 bp, Artificial Sequence
  source: /note="Description of Artificial Sequence: Synthetic polynucleotide"
caagtgcaactcgtccaatccggcgcggaagtcaaaaagcctggagcctccgtcaaagtgtcctgcaaggcctccggttacactttcactcgctacaacatgcattgggtgcggcaggccccgggacagcgcctggaatggatgggcgcaatctaccccggcaacggagacacctcctattcccaaaagttcaagggaagggtcacaatcacggccgacaagagcgcctcaactgcctacatggagctgagcagcctcagatccgaagataccgcggtgtactactgcgcccggagcttcttctacggttcgtctgattggtactttgacgtctggggccagggaaccaccgtgaccgtgtcgtcc

SEQ ID NO: 2164 - protein, 106 aa, Artificial Sequence
  source: /note="Description of Artificial Sequence: Synthetic polypeptide"
DIQLTQSPSFLSASVGDRVTITCRASSSVNNMHWYQQKPGKAPKPLIYATSNLASGVPSRFSGSGSGTEYTLTISSLQPEDFATYYCQQWIFNPPTFGQGTKLEIK

SEQ ID NO: 2165 - DNA, 318 bp, Artificial Sequence
  source: /note="Description of Artificial Sequence: Synthetic polynucleotide"
gacatccagcttacccagtcgccatcattcctgtccgcatcagtgggtgatcgcgtgaccattacctgtcgggcgtcctcctccgtgaacaacatgcactggtaccagcagaagccggggaaggctcccaagcctctgatctacgccactagcaatttggccagcggcgtgccttcgagattctcggggtcgggctcaggaaccgagtataccctgaccatttcctccctccaaccggaggactttgctacttactactgccagcagtggattttcaaccccccgactttcggacagggcaccaagctggaaatcaag

SEQ ID NO: 2166 - protein, 248 aa, Artificial Sequence
  source: /note="Description of Artificial Sequence: Synthetic polypeptide"
QVQLVQSGAEVKKPGASVKVSCKASGYTFTRYNMHWVRQAPGQRLEWMGAIYPGNGDTSYSQKFKGRVTITADKSASTAYMELSSLRSEDTAVYYCARSFFYGSSDWYFDVWGQGTTVTVSSGGGGSGGGGSGGGGSGGGGSDIQLTQSPSFLSASVGDRVTITCRASSSVNNMHWYQQKPGKAPKPLIYATSNLASGVPSRFSGSGSGTEYTLTISSLQPEDFATYYCQQWIFNPPTFGQGTKLEIK

SEQ ID NO: 2167 - DNA, 744 bp, Artificial Sequence
  source: /note="Description of Artificial Sequence: Synthetic polynucleotide"
caagtgcaactcgtccaatccggcgcggaagtcaaaaagcctggagcctccgtcaaagtgtcctgcaaggcctccggttacactttcactcgctacaacatgcattgggtgcggcaggccccgggacagcgcctggaatggatgggcgcaatctaccccggcaacggagacacctcctattcccaaaagttcaagggaagggtcacaatcacggccgacaagagcgcctcaactgcctacatggagctgagcagcctcagatccgaagataccgcggtgtactactgcgcccggagcttcttctacggttcgtctgattggtactttgacgtctggggccagggaaccaccgtgaccgtgtcgtccggtggcggagggagcggtggaggaggctccgggggaggaggcagcggcgggggaggcagcgacatccagcttacccagtcgccatcattcctgtccgcatcagtgggtgatcgcgtgaccattacctgtcgggcgtcctcctccgtgaacaacatgcactggtaccagcagaagccggggaaggctcccaagcctctgatctacgccactagcaatttggccagcggcgtgccttcgagattctcggggtcgggctcaggaaccgagtataccctgaccatttcctccctccaaccggaggactttgctacttactactgccagcagtggattttcaaccccccgactttcggacagggcaccaagctggaaatcaag

SEQ ID NO: 2168 - protein, 492 aa, Artificial Sequence
  source: /note="Description of Artificial Sequence: Synthetic polypeptide"
MALPVTALLLPLALLLHAARPQVQLVQSGAEVKKPGASVKVSCKASGYTFTRYNMHWVRQAPGQRLEWMGAIYPGNGDTSYSQKFKGRVTITADKSASTAYMELSSLRSEDTAVYYCARSFFYGSSDWYFDVWGQGTTVTVSSGGGGSGGGGSGGGGSGGGGSDIQLTQSPSFLSASVGDRVTITCRASSSVNNMHWYQQKPGKAPKPLIYATSNLASGVPSRFSGSGSGTEYTLTISSLQPEDFATYYCQQWIFNPPTFGQGTKLEIKTTTPAPRPPTPAPTIASQPLSLRPEACRPAAGGAVHTRGLDFACDIYIWAPLAGTCGVLLLSLVITLYCKRGRKKLLYIFKQPFMRPVQTTQEEDGCSCRFPEEEEGGCELRVKFSRSADAPAYQQGQNQLYNELNLGRREEYDVLDKRRGRDPEMGGKPRRKNPQEGLYNELQKDKMAEAYSEIGMKGERRRGKGHDGLYQGLSTATKDTYDALHMQALPPR

SEQ ID NO: 2169 - DNA, 1476 bp, Artificial Sequence
  source: /note="Description of Artificial Sequence: Synthetic polynucleotide"
atggccctccctgtcaccgccctgctgcttccgctggctcttctgctccacgccgctcggccccaagtgcaactcgtccaatccggcgcggaagtcaaaaagcctggagcctccgtcaaagtgtcctgcaaggcctccggttacactttcactcgctacaacatgcattgggtgcggcaggccccgggacagcgcctggaatggatgggcgcaatctaccccggcaacggagacacctcctattcccaaaagttcaagggaagggtcacaatcacggccgacaagagcgcctcaactgcctacatggagctgagcagcctcagatccgaagataccgcggtgtactactgcgcccggagcttcttctacggttcgtctgattggtactttgacgtctggggccagggaaccaccgtgaccgtgtcgtccggtggcggagggagcggtggaggaggctccgggggaggaggcagcggcgggggaggcagcgacatccagcttacccagtcgccatcattcctgtccgcatcagtgggtgatcgcgtgaccattacctgtcgggcgtcctcctccgtgaacaacatgcactggtaccagcagaagccggggaaggctcccaagcctctgatctacgccactagcaatttggccagcggcgtgccttcgagattctcggggtcgggctcaggaaccgagtataccctgaccatttcctccctccaaccggaggactttgctacttactactgccagcagtggattttcaaccccccgactttcggacagggcaccaagctggaaatcaagaccactaccccagcaccgaggccacccaccccggctcctaccatcgcctcccagcctctgtccctgcgtccggaggcatgtagacccgcagctggtggggccgtgcatacccggggtcttgacttcgcctgcgatatctacatttgggcccctctggctggtacttgcggggtcctgctgctttcactcgtgatcactctttactgtaagcgcggtcggaagaagctgctgtacatctttaagcaacccttcatgaggcctgtgcagactactcaagaggaggacggctgttcatgccggttcccagaggaggaggaaggcggctgcgaactgcgcgtgaaattcagccgcagcgcagatgctccagcctaccagcaggggcagaaccagctctacaacgaactcaatcttggtcggagagaggagtacgacgtgctggacaagcggagaggacgggacccagaaatgggcgggaagccgcgcagaaagaatccccaagagggcctgtacaacgagctccaaaaggataagatggcagaagcctatagcgagattggtatgaaaggggaacgcagaagaggcaaaggccacgacggactgtaccagggactcagcaccgccaccaaggacacctatgacgctcttcacatgcaggccctgccgcctcgg

SEQ ID NO: 2170 - protein, 122 aa, Artificial Sequence
  source: /note="Description of Artificial Sequence: Synthetic polypeptide"
QVQLVQSGAEVKKPGSSVKVSCKASGYTFTRYNMHWVRQAPGQGLEWMGAIYPGNGDTSYSQKFKGRVTITADKSTSTAYMELSSLRSEDTAVYYCARSFFYGSSDWYFDVWGQGTTVTVSS

SEQ ID NO: 2171 - DNA, 366 bp, Artificial Sequence
  source: /note="Description of Artificial Sequence: Synthetic polynucleotide"
caagtgcaactcgtccagtccggtgcagaagtcaagaagcctggttcctccgtgaaagtgtcctgcaaagcgtctggctacaccttcacccggtacaatatgcactgggtcagacaggcgcccggacagggcctggagtggatgggggccatctaccctgggaacggcgacactagctactcccaaaagttcaagggccgcgtgacgattaccgccgacaagtcaaccagcactgcctatatggagctgagctcgcttcggagcgaagataccgccgtgtactactgcgctcggagcttcttctacgggtcctcggattggtacttcgacgtctggggccaggggactactgtgaccgtgtcctcc

SEQ ID NO: 2172 - DNA, 318 bp, Artificial Sequence
  source: /note="Description of Artificial Sequence: Synthetic polynucleotide"
gaaatcgtgctgacccagtccccggactttcagtcagtgactcccaaggagaaggtcaccattacttgtcgcgcctcctcctcggtgaacaacatgcactggtaccagcagaagccggaccagtccccgaagcccctgatctatgctacctccaacttggcgtccggcgtgccgtcaaggttcagcggatcgggttccgggacagactacaccctgactattaactcactcgaggccgaggatgccgccacctactactgccagcagtggatcttcaaccctccaaccttcggacaaggaaccaagctggaaatcaag

SEQ ID NO: 2173 - protein, 248 aa, Artificial Sequence
  source: /note="Description of Artificial Sequence: Synthetic polypeptide"
QVQLVQSGAEVKKPGSSVKVSCKASGYTFTRYNMHWVRQAPGQGLEWMGAIYPGNGDTSYSQKFKGRVTITADKSTSTAYMELSSLRSEDTAVYYCARSFFYGSSDWYFDVWGQGTTVTVSSGGGGSGGGGSGGGGSGGGGSEIVLTQSPDFQSVTPKEKVTITCRASSSVNNMHWYQQKPDQSPKPLIYATSNLASGVPSRFSGSGSGTDYTLTINSLEAEDAATYYCQQWIFNPPTFGQGTKLEIK

SEQ ID NO: 2174 - DNA, 744 bp, Artificial Sequence
  source: /note="Description of Artificial Sequence: Synthetic polynucleotide"
caagtgcaactcgtccagtccggtgcagaagtcaagaagcctggttcctccgtgaaagtgtcctgcaaagcgtctggctacaccttcacccggtacaatatgcactgggtcagacaggcgcccggacagggcctggagtggatgggggccatctaccctgggaacggcgacactagctactcccaaaagttcaagggccgcgtgacgattaccgccgacaagtcaaccagcactgcctatatggagctgagctcgcttcggagcgaagataccgccgtgtactactgcgctcggagcttcttctacgggtcctcggattggtacttcgacgtctggggccaggggactactgtgaccgtgtcctccgggggaggaggatcgggcggaggcggttcgggaggcggcggaagcggaggcggaggttcagaaatcgtgctgacccagtccccggactttcagtcagtgactcccaaggagaaggtcaccattacttgtcgcgcctcctcctcggtgaacaacatgcactggtaccagcagaagccggaccagtccccgaagcccctgatctatgctacctccaacttggcgtccggcgtgccgtcaaggttcagcggatcgggttccgggacagactacaccctgactattaactcactcgaggccgaggatgccgccacctactactgccagcagtggatcttcaaccctccaaccttcggacaaggaaccaagctggaaatcaag

SEQ ID NO: 2175 - protein, 492 aa, Artificial Sequence
  source: /note="Description of Artificial Sequence: Synthetic polypeptide"
MALPVTALLLPLALLLHAARPQVQLVQSGAEVKKPGSSVKVSCKASGYTFTRYNMHWVRQAPGQGLEWMGAIYPGNGDTSYSQKFKGRVTITADKSTSTAYMELSSLRSEDTAVYYCARSFFYGSSDWYFDVWGQGTTVTVSSGGGGSGGGGSGGGGSGGGGSEIVLTQSPDFQSVTPKEKVTITCRASSSVNNMHWYQQKPDQSPKPLIYATSNLASGVPSRFSGSGSGTDYTLTINSLEAEDAATYYCQQWIFNPPTFGQGTKLEIKTTTPAPRPPTPAPTIASQPLSLRPEACRPAAGGAVHTRGLDFACDIYIWAPLAGTCGVLLLSLVITLYCKRGRKKLLYIFKQPFMRPVQTTQEEDGCSCRFPEEEEGGCELRVKFSRSADAPAYQQGQNQLYNELNLGRREEYDVLDKRRGRDPEMGGKPRRKNPQEGLYNELQKDKMAEAYSEIGMKGERRRGKGHDGLYQGLSTATKDTYDALHMQALPPR

SEQ ID NO: 2176 - DNA, 1476 bp, Artificial Sequence
  source: /note="Description of Artificial Sequence: Synthetic polynucleotide"
atggccctccctgtcaccgccctgctgcttccgctggctcttctgctccacgccgctcggccccaagtgcaactcgtccagtccggtgcagaagtcaagaagcctggttcctccgtgaaagtgtcctgcaaagcgtctggctacaccttcacccggtacaatatgcactgggtcagacaggcgcccggacagggcctggagtggatgggggccatctaccctgggaacggcgacactagctactcccaaaagttcaagggccgcgtgacgattaccgccgacaagtcaaccagcactgcctatatggagctgagctcgcttcggagcgaagataccgccgtgtactactgcgctcggagcttcttctacgggtcctcggattggtacttcgacgtctggggccaggggactactgtgaccgtgtcctccgggggaggaggatcgggcggaggcggttcgggaggcggcggaagcggaggcggaggttcagaaatcgtgctgacccagtccccggactttcagtcagtgactcccaaggagaaggtcaccattacttgtcgcgcctcctcctcggtgaacaacatgcactggtaccagcagaagccggaccagtccccgaagcccctgatctatgctacctccaacttggcgtccggcgtgccgtcaaggttcagcggatcgggttccgggacagactacaccctgactattaactcactcgaggccgaggatgccgccacctactactgccagcagtggatcttcaaccctccaaccttcggacaaggaaccaagctggaaatcaagaccactaccccagcaccgaggccacccaccccggctcctaccatcgcctcccagcctctgtccctgcgtccggaggcatgtagacccgcagctggtggggccgtgcatacccggggtcttgacttcgcctgcgatatctacatttgggcccctctggctggtacttgcggggtcctgctgctttcactcgtgatcactctttactgtaagcgcggtcggaagaagctgctgtacatctttaagcaacccttcatgaggcctgtgcagactactcaagaggaggacggctgttcatgccggttcccagaggaggaggaaggcggctgcgaactgcgcgtgaaattcagccgcagcgcagatgctccagcctaccagcaggggcagaaccagctctacaacgaactcaatcttggtcggagagaggagtacgacgtgctggacaagcggagaggacgggacccagaaatgggcgggaagccgcgcagaaagaatccccaagagggcctgtacaacgagctccaaaaggataagatggcagaagcctatagcgagattggtatgaaaggggaacgcagaagaggcaaaggccacgacggactgtaccagggactcagcaccgccaccaaggacacctatgacgctcttcacatgcaggccctgccgcctcgg

SEQ ID NO: 2177 - DNA, 366 bp, Artificial Sequence
  source: /note="Description of Artificial Sequence: Synthetic polynucleotide"
caagtccaactcgtccagtctggcgcagaagtcaagaagcccggaagctccgtgaaagtgtcctgcaaagcgtcgggttacactttcacccggtacaacatgcactgggtcagacaggcccctggacaaggactggagtggatgggtgccatctaccctggaaacggagatacctcctactcccaaaagttcaaggggagagtgaccattaccgccgacaagtcaacttccaccgcttacatggagctcagctccctgcggtccgaagatactgcggtgtactattgcgctcgctcatttttctacggctcatcggattggtacttcgacgtctggggacagggaactaccgtgaccgtgtcctcg

SEQ ID NO: 2178 - DNA, 318 bp, Artificial Sequence
  source: /note="Description of Artificial Sequence: Synthetic polynucleotide"
gacatccagctgactcagtccccgtccttcctgtccgcctccgtgggggaccgcgtgacgattacttgtcgggcctcctcatccgtgaacaacatgcattggtaccagcagaagccaggaaaggcaccgaagccgcttatctatgccacctcgaatctggccagcggagtgccttcgaggtttagcggctccggctccggcaccgagtacactttgaccattagcagcctccagccggaggacttcgccacatactactgccagcagtggatcttcaacccccccaccttcggccaaggaaccaagctggaaatcaag

SEQ ID NO: 2179 - protein, 248 aa, Artificial Sequence
  source: /note="Description of Artificial Sequence: Synthetic polypeptide"
QVQLVQSGAEVKKPGSSVKVSCKASGYTFTRYNMHWVRQAPGQGLEWMGAIYPGNGDTSYSQKFKGRVTITADKSTSTAYMELSSLRSEDTAVYYCARSFFYGSSDWYFDVWGQGTTVTVSSGGGGSGGGGSGGGGSGGGGSDIQLTQSPSFLSASVGDRVTITCRASSSVNNMHWYQQKPGKAPKPLIYATSNLASGVPSRFSGSGSGTEYTLTISSLQPEDFATYYCQQWIFNPPTFGQGTKLEIK

SEQ ID NO: 2180 - DNA, 744 bp, Artificial Sequence
  source: /note="Description of Artificial Sequence: Synthetic polynucleotide"
caagtccaactcgtccagtctggcgcagaagtcaagaagcccggaagctccgtgaaagtgtcctgcaaagcgtcgggttacactttcacccggtacaacatgcactgggtcagacaggcccctggacaaggactggagtggatgggtgccatctaccctggaaacggagatacctcctactcccaaaagttcaaggggagagtgaccattaccgccgacaagtcaacttccaccgcttacatggagctcagctccctgcggtccgaagatactgcggtgtactattgcgctcgctcatttttctacggctcatcggattggtacttcgacgtctggggacagggaactaccgtgaccgtgtcctcggggggaggaggatcgggcggaggcggttcgggaggcggcggaagcggaggcggaggttcagacatccagctgactcagtccccgtccttcctgtccgcctccgtgggggaccgcgtgacgattacttgtcgggcctcctcatccgtgaacaacatgcattggtaccagcagaagccaggaaaggcaccgaagccgcttatctatgccacctcgaatctggccagcggagtgccttcgaggtttagcggctccggctccggcaccgagtacactttgaccattagcagcctccagccggaggacttcgccacatactactgccagcagtggatcttcaacccccccaccttcggccaaggaaccaagctggaaatcaag

SEQ ID NO: 2181 - protein, 492 aa, Artificial Sequence
  source: /note="Description of Artificial Sequence: Synthetic polypeptide"
MALPVTALLLPLALLLHAARPQVQLVQSGAEVKKPGSSVKVSCKASGYTFTRYNMHWVRQAPGQGLEWMGAIYPGNGDTSYSQKFKGRVTITADKSTSTAYMELSSLRSEDTAVYYCARSFFYGSSDWYFDVWGQGTTVTVSSGGGGSGGGGSGGGGSGGGGSDIQLTQSPSFLSASVGDRVTITCRASSSVNNMHWYQQKPGKAPKPLIYATSNLASGVPSRFSGSGSGTEYTLTISSLQPEDFATYYCQQWIFNPPTFGQGTKLEIKTTTPAPRPPTPAPTIASQPLSLRPEACRPAAGGAVHTRGLDFACDIYIWAPLAGTCGVLLLSLVITLYCKRGRKKLLYIFKQPFMRPVQTTQEEDGCSCRFPEEEEGGCELRVKFSRSADAPAYQQGQNQLYNELNLGRREEYDVLDKRRGRDPEMGGKPRRKNPQEGLYNELQKDKMAEAYSEIGMKGERRRGKGHDGLYQGLSTATKDTYDALHMQALPPR

SEQ ID NO: 2182 - DNA, 1476 bp, Artificial Sequence
  source: /note="Description of Artificial Sequence: Synthetic polynucleotide"
atggccctccctgtcaccgccctgctgcttccgctggctcttctgctccacgccgctcggccccaagtccaactcgtccagtctggcgcagaagtcaagaagcccggaagctccgtgaaagtgtcctgcaaagcgtcgggttacactttcacccggtacaacatgcactgggtcagacaggcccctggacaaggactggagtggatgggtgccatctaccctggaaacggagatacctcctactcccaaaagttcaaggggagagtgaccattaccgccgacaagtcaacttccaccgcttacatggagctcagctccctgcggtccgaagatactgcggtgtactattgcgctcgctcatttttctacggctcatcggattggtacttcgacgtctggggacagggaactaccgtgaccgtgtcctcggggggaggggggagcggcggagggggctcgggcggtggaggaagcggaggcggcggttcggacatccagctgactcagtccccgtccttcctgtccgcctccgtgggggaccgcgtgacgattacttgtcgggcctcctcatccgtgaacaacatgcattggtaccagcagaagccaggaaaggcaccgaagccgcttatctatgccacctcgaatctggccagcggagtgccttcgaggtttagcggctccggctccggcaccgagtacactttgaccattagcagcctccagccggaggacttcgccacatactactgccagcagtggatcttcaacccccccaccttcggccaaggaaccaagctggaaatcaagaccactaccccagcaccgaggccacccaccccggctcctaccatcgcctcccagcctctgtccctgcgtccggaggcatgtagacccgcagctggtggggccgtgcatacccggggtcttgacttcgcctgcgatatctacatttgggcccctctggctggtacttgcggggtcctgctgctttcactcgtgatcactctttactgtaagcgcggtcggaagaagctgctgtacatctttaagcaacccttcatgaggcctgtgcagactactcaagaggaggacggctgttcatgccggttcccagaggaggaggaaggcggctgcgaactgcgcgtgaaattcagccgcagcgcagatgctccagcctaccagcaggggcagaaccagctctacaacgaactcaatcttggtcggagagaggagtacgacgtgctggacaagcggagaggacgggacccagaaatgggcgggaagccgcgcagaaagaatccccaagagggcctgtacaacgagctccaaaaggataagatggcagaagcctatagcgagattggtatgaaaggggaacgcagaagaggcaaaggccacgacggactgtaccagggactcagcaccgccaccaaggacacctatgacgctcttcacatgcaggccctgccgcctcgg

SEQ ID NO: 2183 - protein, 122 aa, Artificial Sequence
  source: /note="Description of Artificial Sequence: Synthetic polypeptide"
QVHLQQSGAELAKPGASVKMSCKASGYTFTNYWMHWVKQRPGQGLEWIGFITPTTGYPEYNQKFKDKATLTADKSSSTAYMQLSSLTSEDSAVYYCARRKVGKGVYYALDYWGQGTSVTVSS

SEQ ID NO: 2184 - DNA, 366 bp, Artificial Sequence
  source: /note="Description of Artificial Sequence: Synthetic polynucleotide"
caagtgcatctgcagcagtcgggggccgaactggcaaagccaggcgccagcgtgaagatgagctgcaaggcctccgggtacaccttcaccaactactggatgcactgggtcaagcagcgcccgggccagggactcgagtggatcgggttcatcacgccgactaccggctacccggagtataaccagaagttcaaggacaaggccactctgactgccgacaagtcctcgtctaccgcgtacatgcaactgtcctcactgacttcggaggattccgctgtgtactactgcgcgcggaggaaagtcggaaagggagtgtactatgccctggactactggggccagggtaccagcgtcactgtgtcctcc

SEQ ID NO: 2185 - protein, 107 aa, Artificial Sequence
  source: /note="Description of Artificial Sequence: Synthetic polypeptide"
DILMTQSPASLSASVGETVTITCRASGNIHNYLAWYQQKQGNSPQLLVYNTKTLADGVPSRFSGSGSGTQYSLKINSLQTEDFGTYYCQHFWSSPWTFGGGTKLEIK

SEQ ID NO: 2186 - DNA, 321 bp, Artificial Sequence
  source: /note="Description of Artificial Sequence: Synthetic polynucleotide"
gacattctgatgacccagtcccctgcatcactctccgcgtccgtgggagaaaccgtgaccatcacgtgtagagcctccggcaacatccacaactacctggcctggtaccagcagaagcagggaaactcgccccaactgcttgtgtacaacaccaagaccttggctgacggagtgccttcccggttctcgggttcgggatcaggcacacagtactccctgaaaatcaatagcctccagaccgaagattttggaacctactactgccaacacttctggagctccccctggactttcggaggcggtaccaagctcgagattaag

SEQ ID NO: 2187 - protein, 122 aa, Artificial Sequence
  source: /note="Description of Artificial Sequence: Synthetic polypeptide"
QVQLQQPGAELVKPGASVKMSCKASGYTFTNYNLHWVKQTPGQGLEWIGAIYPGNYDTSYNQKFKGKATLTADKSSSTAYMLLSSLTSEDSAVYFCARVDFGHSRYWYFDVWGAGTTVTVSS

SEQ ID NO: 2188 - DNA, 366 bp, Artificial Sequence
  source: /note="Description of Artificial Sequence: Synthetic polynucleotide"
caagtgcagctgcagcagcctggtgccgagctcgtgaagccgggagcgtccgtgaagatgagctgcaaagcctcgggctacaccttcaccaattacaacttgcattgggtcaagcagaccccgggccagggcctcgaatggatcggagcgatctaccccgggaactacgatactagctacaaccagaagttcaagggaaaggccaccctgaccgccgataagtcctcatccaccgcctacatgctgctgtcctcgctgacttccgaggactccgctgtgtacttctgcgcccgcgtggacttcggacacagcagatattggtattttgacgtctggggcgccgggactaccgtgactgtgtcgtcc

SEQ ID NO: 2189 - protein, 106 aa, Artificial Sequence
  source: /note="Description of Artificial Sequence: Synthetic polypeptide"
QIVLSQSPAILSASPGEKVTMTCRATSSVSSMNWYQQKPGSFPRPWIHATSNLASGVPARFSGSGSGTSYSLTISRVEAEDAATYYCQQWTFNPPTFGAGAKLELK

SEQ ID NO: 2190 - DNA, 318 bp, Artificial Sequence
  source: /note="Description of Artificial Sequence: Synthetic polynucleotide"
caaattgtcctgagccagagcccggctatcctgtccgcctcaccgggcgaaaaggtcaccatgacttgtcgggccacttcctccgtgtcatccatgaactggtaccagcagaagcctggcagcttccctcggccatggattcacgccacgtcaaacctggcatcgggagtgcccgcaaggttctccgggtccggcagcggaacatcctactccctcaccatctcgcgcgtggaagcggaggacgctgccacctactactgccaacagtggaccttcaacccccccacctttggagcgggagccaagctggaacttaag

SEQ ID NO: 2191 - protein, 122 aa, Artificial Sequence
  source: /note="Description of Artificial Sequence: Synthetic polypeptide"
QVQLQQPGAELVKPGASVKMSCKASGYTFTSYNMHWVKQTPGQGLEWIGAIYPGNGDTSYNPKFKGKATLTADKSSRTAYIHLSSLTSEDSVVYYCARSYFYGSSSWYFDVWGAGTTVTVSS

SEQ ID NO: 2192 - DNA, 366 bp, Artificial Sequence
  source: /note="Description of Artificial Sequence: Synthetic polynucleotide"
caagtgcagctgcagcagccgggagcagagctcgtgaagcctggagcctcagtgaagatgagctgcaaggcctccggttacaccttcacctcctacaacatgcactgggtcaagcagacccccggacaaggcctggaatggatcggcgccatctacccgggaaacggggacacctcctataaccccaagttcaagggaaaagcaaccctgaccgcggacaagtccagcagaactgcctacatccatctttcctcgctgacgtccgaggattccgtggtgtactactgtgcccgctcctacttctacgggtcatcctcgtggtacttcgatgtctggggcgctggaaccaccgtgactgtgtcctcc

SEQ ID NO: 2193 - protein, 106 aa, Artificial Sequence
  source: /note="Description of Artificial Sequence: Synthetic polypeptide"
QIILSQSPAILSASPGEKVTLTCRASSSVSSMHWYQQKPGSSPKPWIFATSNLASGVPARFTGSGSGTSYSLTISRVEAEDAATYYCQQWIFNPPTFGGGTSLEIK

SEQ ID NO: 2194 - DNA, 318 bp, Artificial Sequence
  source: /note="Description of Artificial Sequence: Synthetic polynucleotide"
cagatcattctgagccagagcccggccattctgtctgcctcgcctggagaaaaagtcaccctcacttgccgggccagctcctccgtgtcctcaatgcactggtaccagcagaagcctggctcaagcccgaagccctggatcttcgccacctccaatctggcgtcaggagtgcccgcgaggttcactggatcggggtccggcacatcgtattcgctcaccatttcccgggtggaggccgaggacgccgctacttactactgccaacagtggatcttcaacccaccgacctttggcggagggacttccttggaaatcaag

SEQ ID NO: 2195 - protein, 121 aa, Artificial Sequence
  source: /note="Description of Artificial Sequence: Synthetic polypeptide"
QIQLVQSGPELKKPGETVKISCKTSGYTFTSHGINWVKQAPRKGLKWMGWINTYTGEPTYGDDFKGRFAFSLETSARTAYLQINNLKNEDTATYFCARYGNYEEPYAMDYWGQGTSVTVSS

SEQ ID NO: 2196 - DNA, 363 bp, Artificial Sequence
  source: /note="Description of Artificial Sequence: Synthetic polynucleotide"
caaattcagctggtgcagtcgggacctgagctcaagaagcccggagaaaccgtgaagatctcctgcaagacttccgggtacacttttacttcccacggcatcaactgggtcaagcaggcaccaaggaaggggcttaagtggatgggctggattaacacctacaccggcgaacccacctatggcgatgacttcaaaggacggttcgcgttctccctcgaaacctcagcaagaaccgcgtatttgcaaatcaacaacctgaagaacgaggacaccgccacctacttctgcgcccgctacggaaattacgaggaaccttacgctatggactactggggccagggcacttccgtgactgtgtcgtcc

SEQ ID NO: 2197 - DNA, 318 bp, Artificial Sequence
  source: /note="Description of Artificial Sequence: Synthetic polynucleotide"
cagatcgtgctgagccagagccccgccatcctgagcgcttccccgggagaaaaggtcaccatgacttgccgggccactagcagcgtgtcctccatgaactggtaccagcagaagccgggctccttccctcgcccctggattcatgccacctcaaacctggccagcggagtgccagccagattctcgggatctggatcggggacgtcctactccctcaccatctcgcgggtggaggccgaagatgccgccacatactactgtcaacagtggaccttcaacccgccgacctttggagcgggggccaagctggagctgaaa

SEQ ID NO: 2198 - protein, 122 aa, Artificial Sequence
  source: /note="Description of Artificial Sequence: Synthetic polypeptide"
QVQLQQPGAELVKPGASVKMSCKASGYTFTSYNIHWVKQTPGQGLEWIGAIYPGNGDTSYNQKFKGKATLTADKSSTTAFIHFSSLTSEDSVVYYCARSYFYGSDSWYFDVWGAGTTVTVSS

SEQ ID NO: 2199 - DNA, 366 bp, Artificial Sequence
  source: /note="Description of Artificial Sequence: Synthetic polynucleotide"
caagtgcagcttcagcagcctggggccgaactcgtgaagccaggagcctccgtgaagatgtcatgcaaagcctccggctacacttttacctcctacaacattcattgggtcaagcagacacctggccagggcctggaatggattggtgcaatctacccgggcaacggagacacctcgtacaaccagaagtttaaggggaaggccaccctgaccgcggacaagtcaagcactaccgcgttcattcacttctcgtccttgacctccgaggatagcgtggtgtactactgcgcccgctcctatttctacggctccgattcgtggtacttcgacgtctggggagccggaactaccgtgaccgtgtcctcc

SEQ ID NO: 2200 - protein, 106 aa, Artificial Sequence
  source: /note="Description of Artificial Sequence: Synthetic polypeptide"
QIILSQSPAILSASPGEKVTLTCRASSGVPSLHWYQQKPGSSPKPWIFATSNLASGVPARFSGSGSGTSYSLTISRVEAEDAATYYCQQWIFNPPTFGGGTSLEIK

SEQ ID NO: 2201 - DNA, 318 bp, Artificial Sequence
  source: /note="Description of Artificial Sequence: Synthetic polynucleotide"
caaatcatcctgagccagagcccggccatcctgtcggcttcacccggggaaaaggtcacgctgacttgccgggcctcctccggcgtgccaagcctccactggtaccagcaaaagcctggctcgtcccccaaaccctggattttcgccacctccaacctggctagcggagtgccggccagattctcgggttccgggtccggcaccagctattctctcaccatctcccgggtcgaggcggaggacgcagcgacttactactgtcaacagtggatcttcaatccgcccaccttcggcggaggaacttccctggaaatcaag

SEQ ID NO: 2202 - protein, 122 aa, Artificial Sequence
  source: /note="Description of Artificial Sequence: Synthetic polypeptide"
QVQLLQPGAELVKPGASVKMSCKASGYTFTRYNMHWVKQTPGQGLEWIGAIYPGNGDTSYSQKFKGKATLTADKSSSTAYMQLSSLTSEDSAVYYCARSFFYGSSDWYFDVWGAGTTVSVSS

SEQ ID NO: 2203 - DNA, 366 bp, Artificial Sequence
  source: /note="Description of Artificial Sequence: Synthetic polynucleotide"
caagtgcagctgctgcagcccggagccgaactcgtgaagccgggcgcatccgtgaaaatgagctgcaaggcgtccggttacaccttcactcgctacaacatgcactgggtcaagcagacccctggacaaggcctggagtggattggtgctatctacccgggaaacggagacactagctactcgcagaaattcaagggaaaggccacgctgaccgccgataagtcctcctccactgcctacatgcaactcagctcactgacctcagaggactcggccgtgtactactgcgcgaggtccttcttctacgggtcctcggattggtacttcgacgtctggggcgccggtaccaccgtgtccgtgtcatcc

SEQ ID NO: 2204 - protein, 106 aa, Artificial Sequence
  source: /note="Description of Artificial Sequence: Synthetic polypeptide"
QIVLSQSPAILSTSPGEKVTLTCRASSSVNNMHWYQQKPGSSPKPWIYATSNLASGVPSRFSGSGSGTSYSLTISRVEAEDAATYYCQQWIFNPPTFGAGTKLELK

SEQ ID NO: 2205 - DNA, 318 bp, Artificial Sequence
  source: /note="Description of Artificial Sequence: Synthetic polynucleotide"
cagatcgtgctgagccagtccccggcgattctgtccacctcgcctggggaaaaggtcaccctgacatgtagagcctcctcctccgtgaacaatatgcattggtatcagcagaagccaggatcaagccccaagccctggatctatgccacttcgaaccttgcctctggagtgccctcacggttctccggctcgggatcggggaccagctacagcttgactatctcccgggtggaggctgaggacgccgcaacctactactgccagcaatggatcttcaaccctccgacttttggggccggaaccaagctggaactcaag

SEQ ID NO: 2206 - protein, 117 aa, Artificial Sequence
  source: /note="Description of Artificial Sequence: Synthetic polypeptide"
QVQLVESGGGVVQPGRSLRLSCAASGFTFRDYYMAWVRQAPGKGLEWVASISYEGNPYYGDSVKGRFTISRDNAKSTLYLQMSSLRAEDTAVYYCARHDHNNVDWFAYWGQGTLVTV

SEQ ID NO: 2207 - DNA, 357 bp, Artificial Sequence
  source: /note="Description of Artificial Sequence: Synthetic polynucleotide"
caagtgcagttggtggaatcaggaggaggtgtcgtgcaaccaggaagatcattgaggctctcatgcgccgccagcggattcacctttcgggattactacatggcctgggtccgccaggccccggggaagggactggaatgggtggcatccatctcgtacgaagggaacccctactatggggactccgtgaagggacggttcaccatctcccgggacaacgccaagtccaccctgtaccttcaaatgtcctcgctgagggcggaggatactgctgtctactactgtgcccgccacgaccataacaacgtggactggttcgcctactggggccagggaaccctcgtcaccgtgtcctcg

SEQ ID NO: 2208 - protein, 112 aa, Artificial Sequence
  source: /note="Description of Artificial Sequence: Synthetic polypeptide"
DIVMTQTPLSLSVTPGQPVSMSCKSSQSLLYSENKKNYLAWYLQKPGQSPQLLIFWASTRESGVPDRFSGSGSGTDFTLKISRVEAEDVGVYYCQQYYNFPTFGQGTKLEIK

SEQ ID NO: 2209 - DNA, 336 bp, Artificial Sequence
  source: /note="Description of Artificial Sequence: Synthetic polynucleotide"
gacattgtgatgacgcagactcccctgtcgctctccgtgacccctggccagcccgtgtcgatgtcgtgcaagagctcccagtccctgctgtattccgagaacaagaagaattaccttgcgtggtacctccagaagccggggcagagcccgcagctgctgattttctgggcgtccactagagagtctggagtgcctgaccggtttagcggaagcggctccggtactgatttcaccctgaaaatctcgcgcgtggaagctgaggacgtgggcgtgtactactgccagcagtactacaacttccctactttcggacaaggaaccaagctggaaatcaag

SEQ ID NO: 2210 - protein, 251 aa, Artificial Sequence
  source: /note="Description of Artificial Sequence: Synthetic polypeptide"
QVQLVESGGGVVQPGRSLRLSCAASGFTFRDYYMAWVRQAPGKGLEWVASISYEGNPYYGDSVKGRFTISRDNAKSTLYLQMSSLRAEDTAVYYCARHDHNNVDWFAYWGQGTLVTVSSGGGGSGGGGSGGGGSGGGGSDIVMTQTPLSLSVTPGQPVSMSCKSSQSLLYSENKKNYLAWYLQKPGQSPQLLIFWASTRESGVPDRFSGSGSGTDFTLKISRVEAEDVGVYYCQQYYNFPTFGQGTKLEIK

SEQ ID NO: 2211 - protein, 119 aa, Artificial Sequence
  source: /note="Description of Artificial Sequence: Synthetic polypeptide"
QVQLVQSGAEVKKPGASVKVSCKASGFTFRDYYMAWVRQAPGQRLEWMGSISYEGNPYYGDSVKGRVTITRDNSASTLYMELSSLRSEDTAVYYCARHDHNNVDWFAYWGQGTLVTVSS

SEQ ID NO: 2212 - DNA, 357 bp, Artificial Sequence
  source: /note="Description of Artificial Sequence: Synthetic polynucleotide"
caagtccaactcgtccagtccggtgcagaagtcaagaaaccaggagcttccgtgaaagtgtcgtgcaaagcttcaggcttcaccttccgcgactattacatggcctgggtccgccaagcgcccggacagcggctggagtggatggggtccatttcctacgaggggaacccctactatggagattccgtgaagggcagagtgacgatcactcgggataactccgcctccactctctacatggaactgtcctcgcttcggagcgaagataccgcggtgtactactgcgcccgccacgaccataacaacgtggactggttcgcctactggggacaggggaccctcgtgaccgtgtcctct

SEQ ID NO: 2213 - protein, 112 aa, Artificial Sequence
  source: /note="Description of Artificial Sequence: Synthetic polypeptide"
DIQMTQSPSSLSASVGDRVTITCKSSQSLLYSENKKNYLAWYQQKPGKVPKLLIFWASTRESGVPSRFSGSGSGTDFTLTISSLQPEDVATYYCQQYYNFPTFGQGTKLEIK

SEQ ID NO: 2214 - DNA, 336 bp, Artificial Sequence
  source: /note="Description of Artificial Sequence: Synthetic polynucleotide"
gacattcagatgacccagtccccgagctcgctgtccgcctccgtgggagacagagtgacaatcacttgcaagagcagccagtcactgttgtactccgagaacaagaagaactacctcgcctggtaccagcagaagccgggaaaggtccctaagctgctgatcttctgggccagcactagggagtcgggagtgccgtcacggttcagcggatcgggatcgggtaccgacttcaccctgactatctcctccctgcaacctgaggacgtggccacctactactgtcagcagtactacaattttcccaccttcggccagggtaccaagctggaaatcaag

SEQ ID NO: 2215 - protein, 251 aa, Artificial Sequence
  source: /note="Description of Artificial Sequence: Synthetic polypeptide"
QVQLVQSGAEVKKPGASVKVSCKASGFTFRDYYMAWVRQAPGQRLEWMGSISYEGNPYYGDSVKGRVTITRDNSASTLYMELSSLRSEDTAVYYCARHDHNNVDWFAYWGQGTLVTVSSGGGGSGGGGSGGGGSGGGGSDIQMTQSPSSLSASVGDRVTITCKSSQSLLYSENKKNYLAWYQQKPGKVPKLLIFWASTRESGVPSRFSGSGSGTDFTLTISSLQPEDVATYYCQQYYNFPTFGQGTKLEIK

SEQ ID NO: 2216 - protein, 119 aa, Artificial Sequence
  source: /note="Description of Artificial Sequence: Synthetic polypeptide"
EVQLVQSGAEVKKPGESLKISCKGSGFTFRDYYMAWVRQMPGKGLEWMGSISYEGNPYYGDSVKGQVTISRDNSISTLYLQWSSLKASDTAMYYCARHDHNNVDWFAYWGQGTLVTVSS

SEQ ID NO: 2217 - DNA, 357 bp, Artificial Sequence
  source: /note="Description of Artificial Sequence: Synthetic polynucleotide"
gaagtccaactggtgcagtcaggagcagaagtcaaaaaaccaggagaaagcctcaagatcagctgcaagggctcgggtttcaccttccgggactactatatggcctgggtcagacagatgccgggaaagggactggaatggatggggtcaatcagctacgagggcaacccctactacggagactccgtgaagggacaggtcacaatctcccgggacaactcgatttccactctgtatctgcaatggagctccctcaaggcctccgacactgcgatgtactactgtgcgcggcatgaccacaacaatgtggattggttcgcctactggggacagggaaccctcgtgaccgtgtccagc

SEQ ID NO: 2218 - DNA, 336 bp, Artificial Sequence
  source: /note="Description of Artificial Sequence: Synthetic polynucleotide"
gatatccaaatgacccagtcgccctcctcactctccgcctccgtgggagatcgcgtgaccattacttgcaagagctcgcagtccctgctgtactccgagaacaagaagaactacttggcctggtaccagcagaagcccggcaaagtgccgaagctgcttatcttttgggcctcgaccagggaaagcggagtgccgtcacgcttctccggctccgggtctggcaccgacttcactctgactatttcctccctgcaacctgaggacgtggctacctactactgccagcagtactacaacttccctaccttcggccaagggacgaagctggagatcaag

SEQ ID NO: 2219 - protein, 251 aa, Artificial Sequence
  source: /note="Description of Artificial Sequence: Synthetic polypeptide"
EVQLVQSGAEVKKPGESLKISCKGSGFTFRDYYMAWVRQMPGKGLEWMGSISYEGNPYYGDSVKGQVTISRDNSISTLYLQWSSLKASDTAMYYCARHDHNNVDWFAYWGQGTLVTVSSGGGGSGGGGSGGGGSGGGGSDIQMTQSPSSLSASVGDRVTITCKSSQSLLYSENKKNYLAWYQQKPGKVPKLLIFWASTRESGVPSRFSGSGSGTDFTLTISSLQPEDVATYYCQQYYNFPTFGQGTKLEIK

SEQ ID NO: 2220 - DNA, 357 bp, Artificial Sequence
  source: /note="Description of Artificial Sequence: Synthetic polynucleotide"
gaagtgcagttggtccaatcaggcgcagaagtgaagaaacccggagaatcattgaagatttcgtgcaaaggaagcgggttcacattccgcgattactacatggcgtgggtcagacagatgccgggaaagggactcgagtggatggggtccatcagctacgaaggaaacccttactacggggactccgtgaagggccaggtcaccatctcccgcgacaactcaatctccactctgtatctgcaatggtcgagcctcaaggcctctgatactgcgatgtactactgcgctcggcatgaccacaacaacgtggactggttcgcttactggggacagggtacccttgtgaccgtgtcctcc

SEQ ID NO: 2221 - protein, 112 aa, Artificial Sequence
  source: /note="Description of Artificial Sequence: Synthetic polypeptide"
EIVMTQSPATLSLSPGERATLSCKSSQSLLYSENKKNYLAWYQQKPGQAPRLLIFWASTRESGIPARFSGSGSGTDFTLTISSLQPEDLAVYYCQQYYNFPTFGQGTKLEIK

SEQ ID NO: 2222 - DNA, 336 bp, Artificial Sequence
  source: /note="Description of Artificial Sequence: Synthetic polynucleotide"
gagatcgtgatgactcagtcccctgccaccctctcgctgtcccccggggagagggccacgctgtcctgcaagagctcccagtcactgctgtattccgaaaacaagaagaactacctcgcctggtaccaacagaagccgggacaggccccgcggcttctgatcttctgggcctccactcgggagtccggcattccggcccgcttctccggctcggggagcggaactgacttcaccctgaccatcagcagcctgcagccagaggacctcgcagtgtactactgtcaacagtactacaatttccccacctttggccagggtaccaagctggagattaag

SEQ ID NO: 2223 - protein, 251 aa, Artificial Sequence
  source: /note="Description of Artificial Sequence: Synthetic polypeptide"
EVQLVQSGAEVKKPGESLKISCKGSGFTFRDYYMAWVRQMPGKGLEWMGSISYEGNPYYGDSVKGQVTISRDNSISTLYLQWSSLKASDTAMYYCARHDHNNVDWFAYWGQGTLVTVSSGGGGSGGGGSGGGGSGGGGSEIVMTQSPATLSLSPGERATLSCKSSQSLLYSENKKNYLAWYQQKPGQAPRLLIFWASTRESGIPARFSGSGSGTDFTLTISSLQPEDLAVYYCQQYYNFPTFGQGTKLEIK

SEQ ID NO: 2224 - protein, 17 aa, Artificial Sequence
  source: /note="Description of Artificial Sequence: Synthetic peptide"
TISWNSGSIGYADSVKG

SEQ ID NO: 2225 - protein, 13 aa, Artificial Sequence
  source: /note="Description of Artificial Sequence: Synthetic peptide"
DIQYGNYYYGMDV

SEQ ID NO: 2226 - protein, 7 aa, Artificial Sequence
  source: /note="Description of Artificial Sequence: Synthetic peptide"
GFTFNDY

SEQ ID NO: 2227 - protein, 6 aa, Artificial Sequence
  source: /note="Description of Artificial Sequence: Synthetic peptide"
SWNSGS

SEQ ID NO: 2228 - protein, 8 aa, Artificial Sequence
  source: /note="Description of Artificial Sequence: Synthetic peptide"
GFTFNDYA

SEQ ID NO: 2229 - protein, 8 aa, Artificial Sequence
  source: /note="Description of Artificial Sequence: Synthetic peptide"
ISWNSGSI

SEQ ID NO: 2230 - protein, 15 aa, Artificial Sequence
  source: /note="Description of Artificial Sequence: Synthetic peptide"
AKDIQYGNYYYGMDV

SEQ ID NO: 2231 - protein, 122 aa, Artificial Sequence
  source: /note="Description of Artificial Sequence: Synthetic polypeptide"
EVQLVESGGGLVQPGRSLRLSCAASGFTFNDYAMHWVRQAPGKGLEWVSTISWNSGSIGYADSVKGRFTISRDNAKKSLYLQMNSLRAEDTALYYCAKDIQYGNYYYGMDVWGQGTTVTVSS

SEQ ID NO: 2232 - DNA, 366 bp, Artificial Sequence
  source: /note="Description of Artificial Sequence: Synthetic polynucleotide"
gaggtgcagctggtcgagtcggggggaggattggtgcagccgggcagaagcctgcggctctcatgtgccgcctccggcttcacctttaacgactacgcaatgcactgggtcagacaggctcctgggaagggcctggaatgggtgtccaccatttcctggaactccgggagcatcggctacgctgactccgtgaagggccgcttcacgattagccgcgataacgcgaaaaagagcctgtacctccaaatgaactccctgcgggccgaagataccgccctttactactgcgcgaaggacattcagtatggaaactactactacggaatggacgtctggggacaggggaccacagtgaccgtgtcaagc

SEQ ID NO: 2233 - protein, 11 aa, Artificial Sequence
  source: /note="Description of Artificial Sequence: Synthetic peptide"
RASQSVSSYLA

SEQ ID NO: 2234 - protein, 9 aa, Artificial Sequence
  source: /note="Description of Artificial Sequence: Synthetic peptide"
QQRSNWPIT

SEQ ID NO: 2235 - protein, 7 aa, Artificial Sequence
  source: /note="Description of Artificial Sequence: Synthetic peptide"
SQSVSSY

SEQ ID NO: 2236 - protein, 3 aa, Artificial Sequence
  source: /note="Description of Artificial Sequence: Synthetic peptide"
DAS

SEQ ID NO: 2237 - protein, 6 aa, Artificial Sequence
  source: /note="Description of Artificial Sequence: Synthetic peptide"
RSNWPI

SEQ ID NO: 2238 - protein, 6 aa, Artificial Sequence
  source: /note="Description of Artificial Sequence: Synthetic peptide"
QSVSSY

SEQ ID NO: 2239 - protein, 107 aa, Artificial Sequence
  source: /note="Description of Artificial Sequence: Synthetic polypeptide"
EIVLTQSPATLSLSPGERATLSCRASQSVSSYLAWYQQKPGQAPRLLIYDASNRATGIPARFSGSGSGTDFTLTISSLEPEDFAVYYCQQRSNWPITFGQGTRLEIK

SEQ ID NO: 2240 - DNA, 321 bp, Artificial Sequence
  source: /note="Description of Artificial Sequence: Synthetic polynucleotide"
gaaatcgtgctgacccagagcccagccactttgtcactgtcccccggcgaaagagccactctgtcctgccgggcatcgcagtccgtgtcgtcctacctggcctggtaccagcaaaagcccggacaagcccctcgccttctcatctacgacgcctccaatcgcgcgaccggaatcccggccaggttctccgggagcggttcaggcactgacttcaccctgaccatctcgtccctggagccggaggatttcgccgtgtattactgccagcagcggtccaactggcccatcaccttcggccaagggactcggctcgaaatcaag

SEQ ID NO: 2241 - protein, 249 aa, Artificial Sequence
  source: /note="Description of Artificial Sequence: Synthetic polypeptide"
EVQLVESGGGLVQPGRSLRLSCAASGFTFNDYAMHWVRQAPGKGLEWVSTISWNSGSIGYADSVKGRFTISRDNAKKSLYLQMNSLRAEDTALYYCAKDIQYGNYYYGMDVWGQGTTVTVSSGGGGSGGGGSGGGGSGGGGSEIVLTQSPATLSLSPGERATLSCRASQSVSSYLAWYQQKPGQAPRLLIYDASNRATGIPARFSGSGSGTDFTLTISSLEPEDFAVYYCQQRSNWPITFGQGTRLEIK

SEQ ID NO: 2242 - DNA, 747 bp, Artificial Sequence
  source: /note="Description of Artificial Sequence: Synthetic polynucleotide"
gaggtgcagctggtcgagtcggggggaggattggtgcagccgggcagaagcctgcggctctcatgtgccgcctccggcttcacctttaacgactacgcaatgcactgggtcagacaggctcctgggaagggcctggaatgggtgtccaccatttcctggaactccgggagcatcggctacgctgactccgtgaagggccgcttcacgattagccgcgataacgcgaaaaagagcctgtacctccaaatgaactccctgcgggccgaagataccgccctttactactgcgcgaaggacattcagtatggaaactactactacggaatggacgtctggggacaggggaccacagtgaccgtgtcaagcggcggtggaggatctggcggaggaggttccggtggcggtggatcgggagggggaggatcggaaatcgtgctgacccagagcccagccactttgtcactgtcccccggcgaaagagccactctgtcctgccgggcatcgcagtccgtgtcgtcctacctggcctggtaccagcaaaagcccggacaagcccctcgccttctcatctacgacgcctccaatcgcgcgaccggaatcccggccaggttctccgggagcggttcaggcactgacttcaccctgaccatctcgtccctggagccggaggatttcgccgtgtattactgccagcagcggtccaactggcccatcaccttcggccaagggactcggctcgaaatcaag

SEQ ID NO: 2243 - protein, 119 aa, Artificial Sequence
  source: /note="Description of Artificial Sequence: Synthetic polypeptide"
EVQLVESGGGLVQPGRSLKLSCAASGFTFRDYYMAWVRQAPKKGLEWVASISYEGNPYYGDSVKGRFTISRNNAKSTLYLQMNSLRSEDTATYYCARHDHNNVDWFAYWGQGTLVTVSS

SEQ ID NO: 2244 - protein, 112 aa, Artificial Sequence
  source: /note="Description of Artificial Sequence: Synthetic polypeptide"
DIVMTQTPSSQAVSAGEKVTMSCKSSQSLLYSENKKNYLAWYQQKPGQSPKLLIFWASTRESGVPDRFIGSGSGTDFTLTISSVQAEDLAVYYCQQYYNFPTFGSGTKLEIK

SEQ ID NO: 2245 - protein, 251 aa, Artificial Sequence
  source: /note="Description of Artificial Sequence: Synthetic polypeptide"
EVQLVESGGGLVQPGRSLKLSCAASGFTFRDYYMAWVRQAPKKGLEWVASISYEGNPYYGDSVKGRFTISRNNAKSTLYLQMNSLRSEDTATYYCARHDHNNVDWFAYWGQGTLVTVSSGGGGSGGGGSGGGGSGGGGSDIVMTQTPSSQAVSAGEKVTMSCKSSQSLLYSENKKNYLAWYQQKPGQSPKLLIFWASTRESGVPDRFIGSGSGTDFTLTISSVQAEDLAVYYCQQYYNFPTFGSGTKLEIK

SEQ ID NO: 2246 - protein, 122 aa, Artificial Sequence
  source: /note="Description of Artificial Sequence: Synthetic polypeptide"
EVQLQQSGAELVKPGASVKMSCKASGYTFTSYNMHWVKQTPGQGLEWIGAIYPGNGDTSYNQKFKGKATLTADKSSSTAYMQLSSLTSEDSADYYCARSNYYGSSYWFFDVWGAGTTVTVSS

SEQ ID NO: 2247 - DNA, 366 bp, Artificial Sequence
  source: /note="Description of Artificial Sequence: Synthetic polynucleotide"
gaggtgcaactgcagcagtcaggagcagaactggtcaagccgggcgcatccgtcaagatgagctgcaaggcctcaggatacaccttcacttcatacaacatgcactgggtcaagcagacgcctgggcaggggctggagtggatcggtgccatctaccccggaaacggcgacacctcctacaaccagaagttcaagggaaaggccaccctcaccgctgataagtccagcagcaccgcctacatgcaactgtcgtccctgacttcggaggacagcgctgactactattgcgcccgctctaattactacggttcctcctactggttcttcgacgtgtggggcgcgggtaccactgtgactgtctccagc

SEQ ID NO: 2248 - protein, 106 aa, Artificial Sequence
  source: /note="Description of Artificial Sequence: Synthetic polypeptide"
DIVLTQSPAILSASPGEKVTMTCRASSSVNYMDWYQKKPGSSPKPWIYATSNLASGVPARFSGSGSGTSYSLTISRVEAEDAATYYCQQWSFNPPTFGGGTKLEIK

SEQ ID NO: 2249 - DNA, 318 bp, Artificial Sequence
  source: /note="Description of Artificial Sequence: Synthetic polynucleotide"
gacatcgtgctcactcagtcgcccgccattctgagcgctagccccggcgaaaaggtcaccatgacctgtagagcgtcatcctcggtgaactacatggactggtaccagaagaagccgggatcgagccctaagccatggatctacgccacatccaatctggcgtccggcgtgccggcccggttcagcgggagcggctcaggcacctcctattccctcaccatctcgagagtggaggctgaggatgcagccacgtactactgtcagcagtggtcgttcaaccccccaacctttggtggtggaaccaagctggaaatcaag

SEQ ID NO: 2250 - protein, 18 aa, Artificial Sequence
  source: /note="Description of Artificial Sequence: Synthetic peptide"
GSTSGGGSGGGSGGGGSS

SEQ ID NO: 2251 - protein, 246 aa, Artificial Sequence
  source: /note="Description of Artificial Sequence: Synthetic polypeptide"
DIVLTQSPAILSASPGEKVTMTCRASSSVNYMDWYQKKPGSSPKPWIYATSNLASGVPARFSGSGSGTSYSLTISRVEAEDAATYYCQQWSFNPPTFGGGTKLEIKGSTSGGGSGGGSGGGGSSEVQLQQSGAELVKPGASVKMSCKASGYTFTSYNMHWVKQTPGQGLEWIGAIYPGNGDTSYNQKFKGKATLTADKSSSTAYMQLSSLTSEDSADYYCARSNYYGSSYWFFDVWGAGTTVTVSS

SEQ ID NO: 2252 - DNA, 738 bp, Artificial Sequence
  source: /note="Description of Artificial Sequence: Synthetic polynucleotide"
gacatcgtgctcactcagtcgcccgccattctgagcgctagccccggcgaaaaggtcaccatgacctgtagagcgtcatcctcggtgaactacatggactggtaccagaagaagccgggatcgagccctaagccatggatctacgccacatccaatctggcgtccggcgtgccggcccggttcagcgggagcggctcaggcacctcctattccctcaccatctcgagagtggaggctgaggatgcagccacgtactactgtcagcagtggtcgttcaaccccccaacctttggtggtggaaccaagctggaaatcaagggaagcacctccggcggaggttccggaggagggtccggaggcggaggcagctccgaggtgcaactgcagcagtcaggagcagaactggtcaagccgggcgcatccgtcaagatgagctgcaaggcctcaggatacaccttcacttcatacaacatgcactgggtcaagcagacgcctgggcaggggctggagtggatcggtgccatctaccccggaaacggcgacacctcctacaaccagaagttcaagggaaaggccaccctcaccgctgataagtccagcagcaccgcctacatgcaactgtcgtccctgacttcggaggacagcgctgactactattgcgcccgctctaattactacggttcctcctactggttcttcgacgtgtggggcgcgggtaccactgtgactgtctccagc

SEQ ID NO: 2253 - protein, 253 aa, Artificial Sequence
  source: /note="Description of Artificial Sequence: Synthetic polypeptide"
EVQLQQSGPGLVKPSQTLSLTCAISGDSMLSNSDTWNWIRQSPSRGLEWLGRTYHRSTWYDDYASSVRGRVSINVDTSKNQYSLQLNAVTPEDTGVYYCARVRLQDGNSWSDAFDVWGQGTMVTVSSGGGGSGGGGSGGGGSQSALTQPASASGSPGQSVTISCTGTSSDVGGYNYVSWYQQHPGKAPKLMIYDVSNRPSGVSNRFSGSKSGNTASLTISGLQAEDEADYYCSSYTSSSTLYVFGTGTQLTVL

SEQ ID NO: 2254 - protein, 127 aa, Artificial Sequence
  source: /note="Description of Artificial Sequence: Synthetic polypeptide"
EVQLQQSGPGLVKPSQTLSLTCAISGDSMLSNSDTWNWIRQSPSRGLEWLGRTYHRSTWYDDYASSVRGRVSINVDTSKNQYSLQLNAVTPEDTGVYYCARVRLQDGNSWSDAFDVWGQGTMVTVSS

SEQ ID NO: 2255 - protein, 111 aa, Artificial Sequence
  source: /note="Description of Artificial Sequence: Synthetic polypeptide"
QSALTQPASASGSPGQSVTISCTGTSSDVGGYNYVSWYQQHPGKAPKLMIYDVSNRPSGVSNRFSGSKSGNTASLTISGLQAEDEADYYCSSYTSSSTLYVFGTGTQLTVL

SEQ ID NO: 2256 - protein, 12 aa, Artificial Sequence
  source: /note="Description of Artificial Sequence: Synthetic peptide"
GDSMLSNSDTWN

SEQ ID NO: 2257 - protein, 7 aa, Artificial Sequence
  source: /note="Description of Artificial Sequence: Synthetic peptide"
SNSDTWN

SEQ ID NO: 2258 - protein, 18 aa, Artificial Sequence
  source: /note="Description of Artificial Sequence: Synthetic peptide"
RTYHRSTWYDDYASSVRG

SEQ ID NO: 2259 - protein, 15 aa, Artificial Sequence
  source: /note="Description of Artificial Sequence: Synthetic peptide"
VRLQDGNSWSDAFDV

SEQ ID NO: 2260 - protein, 14 aa, Artificial Sequence
  source: /note="Description of Artificial Sequence: Synthetic peptide"
TGTSSDVGGYNYVS

SEQ ID NO: 2261 - protein, 7 aa, Artificial Sequence
  source: /note="Description of Artificial Sequence: Synthetic peptide"
DVSNRPS

SEQ ID NO: 2262 - protein, 11 aa, Artificial Sequence
  source: /note="Description of Artificial Sequence: Synthetic peptide"
SSYTSSSTLYV

SEQ ID NO: 2263 - protein, 18 aa, Artificial Sequence
  source: /note="Description of Artificial Sequence: Synthetic peptide"
GSTSGSGKPGSGEGSTKG

SEQ ID NO: 2264 - protein, 7 aa, Artificial Sequence
  source: /note="Description of Artificial Sequence: Synthetic peptide"
LAEAAAK

SEQ ID NO: 2265 - protein, 247 aa, Artificial Sequence
  source: /note="Description of Artificial Sequence: Synthetic polypeptide"
EVQLQQSGAEVKKPGSSVKVSCKASGGTFSSYAISWVRQAPGQGLEWMGGIIPIFGTANYAQKFQGRVTITADESTSTAYMELSSLRSEDTAVYYCARDLEMATIMGGYWGQGTLVTVSSGGGGSGGGGSGGGGSQSALTQPASVSGSPGQSITISCTGTSSDVGGYNYVSWYQQHPGKAPKLMIYDVSNRPSGVSNRFSGSKSGNTASLTISGLQAEDEADYYCSSYTSSSTLDVVFGGGTKLTVL

SEQ ID NO: 2266 - DNA, 741 bp, Artificial Sequence
  source: /note="Description of Artificial Sequence: Synthetic polynucleotide"
gaagtgcaactccaacagtcaggcgcagaagtcaagaagcccggatcgtcagtgaaagtgtcctgcaaagcctccggcggaaccttcagctcctacgcaatcagctgggtgcggcaggcgcccggacagggactggagtggatgggcggtatcattccgatctttggcaccgccaattacgcccagaagttccagggacgcgtcacaatcaccgccgacgaatcgacttccaccgcctacatggagctgtcgtccttgaggagcgaagataccgccgtgtactactgcgctcgggatctggagatggccactatcatggggggttactggggccaggggaccctggtcactgtgtcctcgggaggagggggatcaggcggcggcggttccgggggaggaggaagccagtccgcgctgactcagccagcttccgtgtctggttcgccgggacagtccatcactattagctgtaccggcaccagcagcgacgtgggcggctacaactatgtgtcatggtaccagcagcacccggggaaggcgcctaagctgatgatctacgacgtgtccaaccgccctagcggagtgtccaacagattctccggttcgaagtcagggaacactgcctccctcacgattagcgggctgcaagccgaggatgaagccgactactactgctcctcctatacctcctcctcgaccctggacgtggtgttcggaggaggcaccaagctcaccgtcctt

SEQ ID NO: 2267 - protein, 120 aa, Artificial Sequence
  source: /note="Description of Artificial Sequence: Synthetic polypeptide"
EVQLQQSGAEVKKPGSSVKVSCKASGGTFSSYAISWVRQAPGQGLEWMGGIIPIFGTANYAQKFQGRVTITADESTSTAYMELSSLRSEDTAVYYCARDLEMATIMGGYWGQGTLVTVSS

SEQ ID NO: 2268 - protein, 112 aa, Artificial Sequence
  source: /note="Description of Artificial Sequence: Synthetic polypeptide"
QSALTQPASVSGSPGQSITISCTGTSSDVGGYNYVSWYQQHPGKAPKLMIYDVSNRPSGVSNRFSGSKSGNTASLTISGLQAEDEADYYCSSYTSSSTLDVVFGGGTKLTVL

SEQ ID NO: 2269 - protein, 491 aa, Artificial Sequence
  source: /note="Description of Artificial Sequence: Synthetic polypeptide"
MALPVTALLLPLALLLHAARPEVQLQQSGAEVKKPGSSVKVSCKASGGTFSSYAISWVRQAPGQGLEWMGGIIPIFGTANYAQKFQGRVTITADESTSTAYMELSSLRSEDTAVYYCARDLEMATIMGGYWGQGTLVTVSSGGGGSGGGGSGGGGSQSALTQPASVSGSPGQSITISCTGTSSDVGGYNYVSWYQQHPGKAPKLMIYDVSNRPSGVSNRFSGSKSGNTASLTISGLQAEDEADYYCSSYTSSSTLDVVFGGGTKLTVLTTTPAPRPPTPAPTIASQPLSLRPEACRPAAGGAVHTRGLDFACDIYIWAPLAGTCGVLLLSLVITLYCKRGRKKLLYIFKQPFMRPVQTTQEEDGCSCRFPEEEEGGCELRVKFSRSADAPAYKQGQNQLYNELNLGRREEYDVLDKRRGRDPEMGGKPRRKNPQEGLYNELQKDKMAEAYSEIGMKGERRRGKGHDGLYQGLSTATKDTYDALHMQALPPR

SEQ ID NO: 2270 - DNA, 1473 bp, Artificial Sequence
  source: /note="Description of Artificial Sequence: Synthetic polynucleotide"
atggccctccctgtcaccgccctgctgcttccgctggctcttctgctccacgccgctcggcccgaagtgcaactccaacagtcaggcgcagaagtcaagaagcccggatcgtcagtgaaagtgtcctgcaaagcctccggcggaaccttcagctcctacgcaatcagctgggtgcggcaggcgcccggacagggactggagtggatgggcggtatcattccgatctttggcaccgccaattacgcccagaagttccagggacgcgtcacaatcaccgccgacgaatcgacttccaccgcctacatggagctgtcgtccttgaggagcgaagataccgccgtgtactactgcgctcgggatctggagatggccactatcatggggggttactggggccaggggaccctggtcactgtgtcctcgggaggagggggatcaggcggcggcggttccgggggaggaggaagccagtccgcgctgactcagccagcttccgtgtctggttcgccgggacagtccatcactattagctgtaccggcaccagcagcgacgtgggcggctacaactatgtgtcatggtaccagcagcacccggggaaggcgcctaagctgatgatctacgacgtgtccaaccgccctagcggagtgtccaacagattctccggttcgaagtcagggaacactgcctccctcacgattagcgggctgcaagccgaggatgaagccgactactactgctcctcctatacctcctcctcgaccctggacgtggtgttcggaggaggcaccaagctcaccgtccttaccactaccccagcaccgaggccacccaccccggctcctaccatcgcctcccagcctctgtccctgcgtccggaggcatgtagacccgcagctggtggggccgtgcatacccggggtcttgacttcgcctgcgatatctacatttgggcccctctggctggtacttgcggggtcctgctgctttcactcgtgatcactctttactgtaagcgcggtcggaagaagctgctgtacatctttaagcaacccttcatgaggcctgtgcagactactcaagaggaggacggctgttcatgccggttcccagaggaggaggaaggcggctgcgaactgcgcgtgaaattcagccgcagcgcagatgctccagcctacaagcaggggcagaaccagctctacaacgaactcaatcttggtcggagagaggagtacgacgtgctggacaagcggagaggacgggacccagaaatgggcgggaagccgcgcagaaagaatccccaagagggcctgtacaacgagctccaaaaggataagatggcagaagcctatagcgagattggtatgaaaggggaacgcagaagaggcaaaggccacgacggactgtaccagggactcagcaccgccaccaaggacacctatgacgctcttcacatgcaggccctgccgcctcgg

SEQ ID NO: 2271 - protein, 245 aa, Artificial Sequence
  source: /note="Description of Artificial Sequence: Synthetic polypeptide"
EVQLVESGGGVVQPGGSLRLSCAASGFTFDDYAMHWVRQAPGKGLEWVSLISGDGGSTYYADSVKGRFTISRDNSKNTLYLQMNSLRVEDTAVYYCARVFDSYYMDVWGKGTTVTVSSGGGGSGGGGSGSGGSEIVLTQSPLSLPVTPGQPASISCRSSQSLVYTDGNTYLNWFQQRPGQSPRRLIYKVSNRDSGVPDRFSGSGSDTDFTLKISRVEAEDVGIYYCMQGTHWSFTFGQGTRLEIK

SEQ ID NO: 2272 - DNA, 735 bp, Artificial Sequence
  source: /note="Description of Artificial Sequence: Synthetic polynucleotide"
gaagtgcaattggtggaaagcggaggaggagtggtgcaacctggaggaagcctgagactgtcatgtgccgcctcgggattcactttcgatgactacgcaatgcactgggtccgccaggcccccggaaagggtctggaatgggtgtccctcatctccggcgatgggggttccacttactatgcggattctgtgaagggccgcttcacaatctcccgggacaattccaagaacactctgtaccttcaaatgaactccctgagggtggaggacaccgctgtgtactactgcgcgagagtgtttgactcgtactatatggacgtctggggaaagggcaccaccgtgaccgtgtccagcggtggcggtggatcggggggcggcggctccgggagcggaggttccgagattgtgctgactcagtcgccgttgtcactgcctgtcacccccgggcagccggcctccatttcatgccggtccagccagtccctggtctacaccgatgggaacacttacctcaactggttccagcagcgcccaggacagtccccgcggaggctgatctacaaagtgtcaaaccgggactccggcgtccccgatcggttctcgggaagcggcagcgacaccgacttcacgctgaagatttcccgcgtggaagccgaggacgtgggcatctactactgtatgcagggcacccactggtcgtttaccttcggacaaggaactaggctcgagatcaag

SEQ ID NO: 2273 - protein, 118 aa, Artificial Sequence
  source: /note="Description of Artificial Sequence: Synthetic polypeptide"
EVQLVESGGGVVQPGGSLRLSCAASGFTFDDYAMHWVRQAPGKGLEWVSLISGDGGSTYYADSVKGRFTISRDNSKNTLYLQMNSLRVEDTAVYYCARVFDSYYMDVWGKGTTVTVSS

SEQ ID NO: 2274 - protein, 112 aa, Artificial Sequence
  source: /note="Description of Artificial Sequence: Synthetic polypeptide"
EIVLTQSPLSLPVTPGQPASISCRSSQSLVYTDGNTYLNWFQQRPGQSPRRLIYKVSNRDSGVPDRFSGSGSDTDFTLKISRVEAEDVGIYYCMQGTHWSFTFGQGTRLEIK

SEQ ID NO: 2275 - protein, 489 aa, Artificial Sequence
  source: /note="Description of Artificial Sequence: Synthetic polypeptide"
MALPVTALLLPLALLLHAARPEVQLVESGGGVVQPGGSLRLSCAASGFTFDDYAMHWVRQAPGKGLEWVSLISGDGGSTYYADSVKGRFTISRDNSKNTLYLQMNSLRVEDTAVYYCARVFDSYYMDVWGKGTTVTVSSGGGGSGGGGSGSGGSEIVLTQSPLSLPVTPGQPASISCRSSQSLVYTDGNTYLNWFQQRPGQSPRRLIYKVSNRDSGVPDRFSGSGSDTDFTLKISRVEAEDVGIYYCMQGTHWSFTFGQGTRLEIKTTTPAPRPPTPAPTIASQPLSLRPEACRPAAGGAVHTRGLDFACDIYIWAPLAGTCGVLLLSLVITLYCKRGRKKLLYIFKQPFMRPVQTTQEEDGCSCRFPEEEEGGCELRVKFSRSADAPAYKQGQNQLYNELNLGRREEYDVLDKRRGRDPEMGGKPRRKNPQEGLYNELQKDKMAEAYSEIGMKGERRRGKGHDGLYQGLSTATKDTYDALHMQALPPR

SEQ ID NO: 2276 - DNA, 1467 bp, Artificial Sequence
  source: /note="Description of Artificial Sequence: Synthetic polynucleotide"
atggccctccctgtcaccgccctgctgcttccgctggctcttctgctccacgccgctcggcccgaagtgcaattggtggaaagcggaggaggagtggtgcaacctggaggaagcctgagactgtcatgtgccgcctcgggattcactttcgatgactacgcaatgcactgggtccgccaggcccccggaaagggtctggaatgggtgtccctcatctccggcgatgggggttccacttactatgcggattctgtgaagggccgcttcacaatctcccgggacaattccaagaacactctgtaccttcaaatgaactccctgagggtggaggacaccgctgtgtactactgcgcgagagtgtttgactcgtactatatggacgtctggggaaagggcaccaccgtgaccgtgtccagcggtggcggtggatcggggggcggcggctccgggagcggaggttccgagattgtgctgactcagtcgccgttgtcactgcctgtcacccccgggcagccggcctccatttcatgccggtccagccagtccctggtctacaccgatgggaacacttacctcaactggttccagcagcgcccaggacagtccccgcggaggctgatctacaaagtgtcaaaccgggactccggcgtccccgatcggttctcgggaagcggcagcgacaccgacttcacgctgaagatttcccgcgtggaagccgaggacgtgggcatctactactgtatgcagggcacccactggtcgtttaccttcggacaaggaactaggctcgagatcaagaccactaccccagcaccgaggccacccaccccggctcctaccatcgcctcccagcctctgtccctgcgtccggaggcatgtagacccgcagctggtggggccgtgcatacccggggtcttgacttcgcctgcgatatctacatttgggcccctctggctggtacttgcggggtcctgctgctttcactcgtgatcactctttactgtaagcgcggtcggaagaagctgctgtacatctttaagcaacccttcatgaggcctgtgcagactactcaagaggaggacggctgttcatgccggttcccagaggaggaggaaggcggctgcgaactgcgcgtgaaattcagccgcagcgcagatgctccagcctacaagcaggggcagaaccagctctacaacgaactcaatcttggtcggagagaggagtacgacgtgctggacaagcggagaggacgggacccagaaatgggcgggaagccgcgcagaaagaatccccaagagggcctgtacaacgagctccaaaaggataagatggcagaagcctatagcgagattggtatgaaaggggaacgcagaagaggcaaaggccacgacggactgtaccagggactcagcaccgccaccaaggacacctatgacgctcttcacatgcaggccctgccgcctcgg

SEQ ID NO: 2277 - protein, 247 aa, Artificial Sequence
  source: /note="Description of Artificial Sequence: Synthetic polypeptide"
QVQLQESGPGLVKPSETLSLTCTVSGGSISSSSYYWGWIRQPPGKGLEWIGSIYYSGSTYYNPSLKSRVSISVDTSKNQFSLKLKYVTAADTAVYYCATPGTYYDFLSGYYPFYWGQGTLVTVSSGGGGSGGGGSGGGGSDIVMTQSPSSLSASVGDRVTITCRASQGISSYLAWYQQKPGKAPKLLIYAASTLQSGVPSRFSGSGSGTDFTLTISSLQPEDFATYYCQQLNSYPYTFGQGTKLEIK

SEQ ID NO: 2278 - DNA, 741 bp, Artificial Sequence
  source: /note="Description of Artificial Sequence: Synthetic polynucleotide"
caagtgcagcttcaagaaagcggtccaggactcgtcaagccatcagaaactctttccctcacttgtaccgtgtcgggaggcagcatctcctcgagctcctactactggggttggattagacagcccccgggaaaggggttggagtggatcggttccatctactactccgggtcgacctactacaacccttccctgaaatctcgggtgtccatctccgtcgacacctccaagaaccagttcagcctgaagctgaaatatgtgaccgcggccgatactgccgtgtactattgcgccaccccgggaacctactacgacttcctctcggggtactacccgttttactggggacaggggactctcgtgaccgtgtcctcgggcggcggaggttcaggcggtggcggatcggggggaggaggctcagacattgtgatgacccagagcccgtccagcctgagcgcctccgtgggcgatagggtcacgattacttgccgggcgtcccagggaatctcaagctacctggcctggtaccaacagaagcccggaaaggcacccaagttgctgatctatgccgctagcactctgcagtccggggtgccttcccgcttctccggctccggctcgggcaccgacttcaccctgaccatttcctcactgcaacccgaggacttcgccacttactactgccagcagctgaactcctacccttacacattcggacagggaaccaagctggaaatcaag

SEQ ID NO: 2279 - protein, 125 aa, Artificial Sequence
  source: /note="Description of Artificial Sequence: Synthetic polypeptide"
QVQLQESGPGLVKPSETLSLTCTVSGGSISSSSYYWGWIRQPPGKGLEWIGSIYYSGSTYYNPSLKSRVSISVDTSKNQFSLKLKYVTAADTAVYYCATPGTYYDFLSGYYPFYWGQGTLVTVSS

SEQ ID NO: 2280 - protein, 107 aa, Artificial Sequence
  source: /note="Description of Artificial Sequence: Synthetic polypeptide"
DIVMTQSPSSLSASVGDRVTITCRASQGISSYLAWYQQKPGKAPKLLIYAASTLQSGVPSRFSGSGSGTDFTLTISSLQPEDFATYYCQQLNSYPYTFGQGTKLEIK

SEQ ID NO: 2281 - protein, 491 aa, Artificial Sequence
  source: /note="Description of Artificial Sequence: Synthetic polypeptide"
MALPVTALLLPLALLLHAARPQVQLQESGPGLVKPSETLSLTCTVSGGSISSSSYYWGWIRQPPGKGLEWIGSIYYSGSTYYNPSLKSRVSISVDTSKNQFSLKLKYVTAADTAVYYCATPGTYYDFLSGYYPFYWGQGTLVTVSSGGGGSGGGGSGGGGSDIVMTQSPSSLSASVGDRVTITCRASQGISSYLAWYQQKPGKAPKLLIYAASTLQSGVPSRFSGSGSGTDFTLTISSLQPEDFATYYCQQLNSYPYTFGQGTKLEIKTTTPAPRPPTPAPTIASQPLSLRPEACRPAAGGAVHTRGLDFACDIYIWAPLAGTCGVLLLSLVITLYCKRGRKKLLYIFKQPFMRPVQTTQEEDGCSCRFPEEEEGGCELRVKFSRSADAPAYKQGQNQLYNELNLGRREEYDVLDKRRGRDPEMGGKPRRKNPQEGLYNELQKDKMAEAYSEIGMKGERRRGKGHDGLYQGLSTATKDTYDALHMQALPPR

SEQ ID NO: 2282 - DNA, 1473 bp, Artificial Sequence
  source: /note="Description of Artificial Sequence: Synthetic polynucleotide"
atggccctccctgtcaccgccctgctgcttccgctggctcttctgctccacgccgctcggccccaagtgcagcttcaagaaagcggtccaggactcgtcaagccatcagaaactctttccctcacttgtaccgtgtcgggaggcagcatctcctcgagctcctactactggggttggattagacagcccccgggaaaggggttggagtggatcggttccatctactactccgggtcgacctactacaacccttccctgaaatctcgggtgtccatctccgtcgacacctccaagaaccagttcagcctgaagctgaaatatgtgaccgcggccgatactgccgtgtactattgcgccaccccgggaacctactacgacttcctctcggggtactacccgttttactggggacaggggactctcgtgaccgtgtcctcgggcggcggaggttcaggcggtggcggatcggggggaggaggctcagacattgtgatgacccagagcccgtccagcctgagcgcctccgtgggcgatagggtcacgattacttgccgggcgtcccagggaatctcaagctacctggcctggtaccaacagaagcccggaaaggcacccaagttgctgatctatgccgctagcactctgcagtccggggtgccttcccgcttctccggctccggctcgggcaccgacttcaccctgaccatttcctcactgcaacccgaggacttcgccacttactactgccagcagctgaactcctacccttacacattcggacagggaaccaagctggaaatcaagaccactaccccagcaccgaggccacccaccccggctcctaccatcgcctcccagcctctgtccctgcgtccggaggcatgtagacccgcagctggtggggccgtgcatacccggggtcttgacttcgcctgcgatatctacatttgggcccctctggctggtacttgcggggtcctgctgctttcactcgtgatcactctttactgtaagcgcggtcggaagaagctgctgtacatctttaagcaacccttcatgaggcctgtgcagactactcaagaggaggacggctgttcatgccggttcccagaggaggaggaaggcggctgcgaactgcgcgtgaaattcagccgcagcgcagatgctccagcctacaagcaggggcagaaccagctctacaacgaactcaatcttggtcggagagaggagtacgacgtgctggacaagcggagaggacgggacccagaaatgggcgggaagccgcgcagaaagaatccccaagagggcctgtacaacgagctccaaaaggataagatggcagaagcctatagcgagattggtatgaaaggggaacgcagaagaggcaaaggccacgacggactgtaccagggactcagcaccgccaccaaggacacctatgacgctcttcacatgcaggccctgccgcctcgg

SEQ ID NO: 2283 - protein, 239 aa, Artificial Sequence
  source: /note="Description of Artificial Sequence: Synthetic polypeptide"
QVQLVESGGGLVQPGGSLRLSCAASGFTFSSYWMSWVRQAPGKGLEWVANINEDGSAKFYVDSVKGRFTISRDNAKNSLYLQMNSLRAEDTAVYFCARDLRSGRYWGQGTLVTVSSGGGGSGGGGSGGGGSEIVLTQSPGTLSLSPGGRATLSCRASQSISGSFLAWYQQKPGQAPRLLIYGASSRATGIPDRFSGSGSGTDFTLTISRLEPEDFAVYYCQQYGSSPPTFGLGTKLEIK

SEQ ID NO: 2284 - DNA, 717 bp, Artificial Sequence
  source: /note="Description of Artificial Sequence: Synthetic polynucleotide"
caagtgcaactcgtggaatctggtggaggactcgtgcaacccggaggatcattgcgactctcgtgtgcggcatccggctttaccttttcatcctactggatgtcctgggtcagacaggcccccgggaagggactggaatgggtcgcgaacatcaacgaggacggctcggccaagttctacgtggactccgtgaagggccgcttcacgatctcacgggataacgccaagaattccctgtatctgcaaatgaacagcctgagggccgaggacactgcggtgtacttctgcgcacgcgacctgaggtccgggagatactggggacagggcaccctcgtgaccgtgtcgagcggaggaggggggtcgggcggcggcggttccggtggcggcggtagcgaaattgtgttgacccagtcccctggaaccctgagcctgtcacctggaggacgcgccaccctgtcctgccgggccagccagagcatctcagggtccttcctggcttggtaccagcagaagccgggacaggctccgagacttctgatctacggcgcctcctcgcgggcgaccggaatcccggatcggttctccggctcgggaagcggaactgacttcactcttaccatttcccgcctggagccggaagatttcgccgtgtactactgccagcagtacgggtcatcccctccaaccttcggcctgggaactaagctggaaatcaaa

SEQ ID NO: 2285 - protein, 116 aa, Artificial Sequence
  source: /note="Description of Artificial Sequence: Synthetic polypeptide"
QVQLVESGGGLVQPGGSLRLSCAASGFTFSSYWMSWVRQAPGKGLEWVANINEDGSAKFYVDSVKGRFTISRDNAKNSLYLQMNSLRAEDTAVYFCARDLRSGRYWGQGTLVTVSS

SEQ ID NO: 2286 - protein, 108 aa, Artificial Sequence
  source: /note="Description of Artificial Sequence: Synthetic polypeptide"
EIVLTQSPGTLSLSPGGRATLSCRASQSISGSFLAWYQQKPGQAPRLLIYGASSRATGIPDRFSGSGSGTDFTLTISRLEPEDFAVYYCQQYGSSPPTFGLGTKLEIK

SEQ ID NO: 2287 - protein, 483 aa, Artificial Sequence
  source: /note="Description of Artificial Sequence: Synthetic polypeptide"
MALPVTALLLPLALLLHAARPQVQLVESGGGLVQPGGSLRLSCAASGFTFSSYWMSWVRQAPGKGLEWVANINEDGSAKFYVDSVKGRFTISRDNAKNSLYLQMNSLRAEDTAVYFCARDLRSGRYWGQGTLVTVSSGGGGSGGGGSGGGGSEIVLTQSPGTLSLSPGGRATLSCRASQSISGSFLAWYQQKPGQAPRLLIYGASSRATGIPDRFSGSGSGTDFTLTISRLEPEDFAVYYCQQYGSSPPTFGLGTKLEIKTTTPAPRPPTPAPTIASQPLSLRPEACRPAAGGAVHTRGLDFACDIYIWAPLAGTCGVLLLSLVITLYCKRGRKKLLYIFKQPFMRPVQTTQEEDGCSCRFPEEEEGGCELRVKFSRSADAPAYKQGQNQLYNELNLGRREEYDVLDKRRGRDPEMGGKPRRKNPQEGLYNELQKDKMAEAYSEIGMKGERRRGKGHDGLYQGLSTATKDTYDALHMQALPPR

SEQ ID NO: 2288 - DNA, 1449 bp, Artificial Sequence
  source: /note="Description of Artificial Sequence: Synthetic polynucleotide"
atggccctccctgtcaccgccctgctgcttccgctggctcttctgctccacgccgctcggccccaagtgcaactcgtggaatctggtggaggactcgtgcaacccggaggatcattgcgactctcgtgtgcggcatccggctttaccttttcatcctactggatgtcctgggtcagacaggcccccgggaagggactggaatgggtcgcgaacatcaacgaggacggctcggccaagttctacgtggactccgtgaagggccgcttcacgatctcacgggataacgccaagaattccctgtatctgcaaatgaacagcctgagggccgaggacactgcggtgtacttctgcgcacgcgacctgaggtccgggagatactggggacagggcaccctcgtgaccgtgtcgagcggaggaggggggtcgggcggcggcggttccggtggcggcggtagcgaaattgtgttgacccagtcccctggaaccctgagcctgtcacctggaggacgcgccaccctgtcctgccgggccagccagagcatctcagggtccttcctggcttggtaccagcagaagccgggacaggctccgagacttctgatctacggcgcctcctcgcgggcgaccggaatcccggatcggttctccggctcgggaagcggaactgacttcactcttaccatttcccgcctggagccggaagatttcgccgtgtactactgccagcagtacgggtcatcccctccaaccttcggcctgggaactaagctggaaatcaaaaccactaccccagcaccgaggccacccaccccggctcctaccatcgcctcccagcctctgtccctgcgtccggaggcatgtagacccgcagctggtggggccgtgcatacccggggtcttgacttcgcctgcgatatctacatttgggcccctctggctggtacttgcggggtcctgctgctttcactcgtgatcactctttactgtaagcgcggtcggaagaagctgctgtacatctttaagcaacccttcatgaggcctgtgcagactactcaagaggaggacggctgttcatgccggttcccagaggaggaggaaggcggctgcgaactgcgcgtgaaattcagccgcagcgcagatgctccagcctacaagcaggggcagaaccagctctacaacgaactcaatcttggtcggagagaggagtacgacgtgctggacaagcggagaggacgggacccagaaatgggcgggaagccgcgcagaaagaatccccaagagggcctgtacaacgagctccaaaaggataagatggcagaagcctatagcgagattggtatgaaaggggaacgcagaagaggcaaaggccacgacggactgtaccagggactcagcaccgccaccaaggacacctatgacgctcttcacatgcaggccctgccgcctcgg

SEQ ID NO: 2289 - protein, 245 aa, Artificial Sequence
  source: /note="Description of Artificial Sequence: Synthetic polypeptide"
EVQLQQSGPGLVRPSETLSLTCTVSGGPVRSGSHYWNWIRQPPGRGLEWIGYIYYSGSTNYNPSLENRVTISIDTSNNHFSLKLSSVTAADTALYFCARGTATFDWNFPFDSWGQGTLVTVSSGGGGSGGGGSGSGGSDIQMTQSPSSLSASIGDRVTITCRASQSISSYLNWYQQKPGKAPKLLIYAASSLQSGVPSRFSGSGSGTDFTLTISSLQPEDFATYYCQQSYSTPWTFGQGTKLEIK

SEQ ID NO: 2290 - DNA, 735 bp, Artificial Sequence
  source: /note="Description of Artificial Sequence: Synthetic polynucleotide"
gaagtgcaactccaacaatccggtccaggactcgtcagaccctccgaaactctctcgcttacatgcactgtgtccggcggccctgtgcggtccggctctcattactggaactggattcgccagcccccgggacgcggactggagtggatcggctacatctattactcggggtcgactaactacaacccgagcctggaaaatagagtgaccatctcaatcgacacgtccaacaaccacttctcgctgaagttgtcctccgtgactgccgccgatactgccctgtacttctgtgctcgcggaaccgccaccttcgactggaacttcccttttgactcatggggccaggggacccttgtgaccgtgtccagcggaggaggaggctccggtggtggcgggagcggtagcggcggaagcgacatccagatgacccagtcaccgtcctcgctgtccgcatccattggggatcgggtcactattacttgccgggcgtcccagtccatctcgtcctacctgaactggtatcagcagaagccagggaaagcccccaagctgctgatctacgcggccagcagcctgcagtcaggagtgccttcaaggtttagcggcagcggatcgggaaccgacttcaccctgaccatttcctccctccaacccgaggatttcgccacctactactgccagcagtcctactccaccccgtggaccttcggacagggaaccaagctggagatcaag

SEQ ID NO: 2291 - protein, 123 aa, Artificial Sequence
  source: /note="Description of Artificial Sequence: Synthetic polypeptide"
EVQLQQSGPGLVRPSETLSLTCTVSGGPVRSGSHYWNWIRQPPGRGLEWIGYIYYSGSTNYNPSLENRVTISIDTSNNHFSLKLSSVTAADTALYFCARGTATFDWNFPFDSWGQGTLVTVSS

SEQ ID NO: 2292 - protein, 107 aa, Artificial Sequence
  source: /note="Description of Artificial Sequence: Synthetic polypeptide"
DIQMTQSPSSLSASIGDRVTITCRASQSISSYLNWYQQKPGKAPKLLIYAASSLQSGVPSRFSGSGSGTDFTLTISSLQPEDFATYYCQQSYSTPWTFGQGTKLEIK

SEQ ID NO: 2293 - protein, 489 aa, Artificial Sequence
  source: /note="Description of Artificial Sequence: Synthetic polypeptide"
MALPVTALLLPLALLLHAARPEVQLQQSGPGLVRPSETLSLTCTVSGGPVRSGSHYWNWIRQPPGRGLEWIGYIYYSGSTNYNPSLENRVTISIDTSNNHFSLKLSSVTAADTALYFCARGTATFDWNFPFDSWGQGTLVTVSSGGGGSGGGGSGSGGSDIQMTQSPSSLSASIGDRVTITCRASQSISSYLNWYQQKPGKAPKLLIYAASSLQSGVPSRFSGSGSGTDFTLTISSLQPEDFATYYCQQSYSTPWTFGQGTKLEIKTTTPAPRPPTPAPTIASQPLSLRPEACRPAAGGAVHTRGLDFACDIYIWAPLAGTCGVLLLSLVITLYCKRGRKKLLYIFKQPFMRPVQTTQEEDGCSCRFPEEEEGGCELRVKFSRSADAPAYKQGQNQLYNELNLGRREEYDVLDKRRGRDPEMGGKPRRKNPQEGLYNELQKDKMAEAYSEIGMKGERRRGKGHDGLYQGLSTATKDTYDALHMQALPPR

SEQ ID NO: 2294 - DNA, 1467 bp, Artificial Sequence
  source: /note="Description of Artificial Sequence: Synthetic polynucleotide"
atggccctccctgtcaccgccctgctgcttccgctggctcttctgctccacgccgctcggcccgaagtgcaactccaacaatccggtccaggactcgtcagaccctccgaaactctctcgcttacatgcactgtgtccggcggccctgtgcggtccggctctcattactggaactggattcgccagcccccgggacgcggactggagtggatcggctacatctattactcggggtcgactaactacaacccgagcctggaaaatagagtgaccatctcaatcgacacgtccaacaaccacttctcgctgaagttgtcctccgtgactgccgccgatactgccctgtacttctgtgctcgcggaaccgccaccttcgactggaacttcccttttgactcatggggccaggggacccttgtgaccgtgtccagcggaggaggaggctccggtggtggcgggagcggtagcggcggaagcgacatccagatgacccagtcaccgtcctcgctgtccgcatccattggggatcgggtcactattacttgccgggcgtcccagtccatctcgtcctacctgaactggtatcagcagaagccagggaaagcccccaagctgctgatctacgcggccagcagcctgcagtcaggagtgccttcaaggtttagcggcagcggatcgggaaccgacttcaccctgaccatttcctccctccaacccgaggatttcgccacctactactgccagcagtcctactccaccccgtggaccttcggacagggaaccaagctggagatcaagaccactaccccagcaccgaggccacccaccccggctcctaccatcgcctcccagcctctgtccctgcgtccggaggcatgtagacccgcagctggtggggccgtgcatacccggggtcttgacttcgcctgcgatatctacatttgggcccctctggctggtacttgcggggtcctgctgctttcactcgtgatcactctttactgtaagcgcggtcggaagaagctgctgtacatctttaagcaacccttcatgaggcctgtgcagactactcaagaggaggacggctgttcatgccggttcccagaggaggaggaaggcggctgcgaactgcgcgtgaaattcagccgcagcgcagatgctccagcctacaagcaggggcagaaccagctctacaacgaactcaatcttggtcggagagaggagtacgacgtgctggacaagcggagaggacgggacccagaaatgggcgggaagccgcgcagaaagaatccccaagagggcctgtacaacgagctccaaaaggataagatggcagaagcctatagcgagattggtatgaaaggggaacgcagaagaggcaaaggccacgacggactgtaccagggactcagcaccgccaccaaggacacctatgacgctcttcacatgcaggccctgccgcctcgg

SEQ ID NO: 2295 - protein, 249 aa, Artificial Sequence
  source: /note="Description of Artificial Sequence: Synthetic polypeptide"
QVQLQESGAGLLKPSETLSLTCAVYGGSFSGYYWSWIRQPPGKGLEWVGEINHSGSTNYNPSLKSRVTISVDTSKNQFSLKLSSVTAADTAVYYCARGSGLVVYAIRVGSGWFDYWGQGTLVTVSSGGGGSGGGDSGGGGSDIQMTQSPSSLSASVGDRVTITCRASQSISSYLNWYQQKPGKAPKLLMYAASSLQSGVPSRFSGSGSGTDFTLTISSLQPEDFATYYCQQSYSTPPWTFGQGTKVDIK

SEQ ID NO: 2296 - DNA, 747 bp, Artificial Sequence
  source: /note="Description of Artificial Sequence: Synthetic polynucleotide"
caagtgcaacttcaagaatcaggcgcaggacttctcaagccatccgaaacactctccctcacttgcgcggtgtacgggggaagcttctcgggatactactggtcctggattaggcagcctcccggcaaaggcctggaatgggtcggggagatcaaccactccggttcaaccaactacaacccgtcgctgaagtcccgcgtgaccatttccgtggacacctctaagaatcagttcagcctgaagctctcgtccgtgaccgcggcggacaccgccgtctactactgcgctcggggatcaggactggtggtgtacgccatccgcgtgggctcgggctggttcgattactggggccagggaaccctggtcactgtgtcgtccggcggaggaggttcggggggcggagacagcggtggagggggtagcgacatccagatgacccagtccccgtcctcgctgtccgcctccgtgggagatagagtgaccatcacctgtcgggcatcccagagcatttccagctacctgaactggtatcagcagaagcccggaaaggcccctaagctgttgatgtacgccgccagcagcttgcagtcgggcgtgccgagccggttttccggttccggctccgggactgacttcaccctgactatctcatccctgcaacccgaggacttcgccacttattactgccagcagtcctactcaacccctccctggacgttcggacagggcaccaaggtcgatatcaag

SEQ ID NO: 2297 - protein, 126 aa, Artificial Sequence
  source: /note="Description of Artificial Sequence: Synthetic polypeptide"
QVQLQESGAGLLKPSETLSLTCAVYGGSFSGYYWSWIRQPPGKGLEWVGEINHSGSTNYNPSLKSRVTISVDTSKNQFSLKLSSVTAADTAVYYCARGSGLVVYAIRVGSGWFDYWGQGTLVTVSS

SEQ ID NO: 2298 - protein, 108 aa, Artificial Sequence
  source: /note="Description of Artificial Sequence: Synthetic polypeptide"
DIQMTQSPSSLSASVGDRVTITCRASQSISSYLNWYQQKPGKAPKLLMYAASSLQSGVPSRFSGSGSGTDFTLTISSLQPEDFATYYCQQSYSTPPWTFGQGTKVDIK

SEQ ID NO: 2299 - protein, 493 aa, Artificial Sequence
  source: /note="Description of Artificial Sequence: Synthetic polypeptide"
MALPVTALLLPLALLLHAARPQVQLQESGAGLLKPSETLSLTCAVYGGSFSGYYWSWIRQPPGKGLEWVGEINHSGSTNYNPSLKSRVTISVDTSKNQFSLKLSSVTAADTAVYYCARGSGLVVYAIRVGSGWFDYWGQGTLVTVSSGGGGSGGGDSGGGGSDIQMTQSPSSLSASVGDRVTITCRASQSISSYLNWYQQKPGKAPKLLMYAASSLQSGVPSRFSGSGSGTDFTLTISSLQPEDFATYYCQQSYSTPPWTFGQGTKVDIKTTTPAPRPPTPAPTIASQPLSLRPEACRPAAGGAVHTRGLDFACDIYIWAPLAGTCGVLLLSLVITLYCKRGRKKLLYIFKQPFMRPVQTTQEEDGCSCRFPEEEEGGCELRVKFSRSADAPAYKQGQNQLYNELNLGRREEYDVLDKRRGRDPEMGGKPRRKNPQEGLYNELQKDKMAEAYSEIGMKGERRRGKGHDGLYQGLSTATKDTYDALHMQALPPR

SEQ ID NO: 2300 - DNA, 1479 bp, Artificial Sequence
  source: /note="Description of Artificial Sequence: Synthetic polynucleotide"
atggccctccctgtcaccgccctgctgcttccgctggctcttctgctccacgccgctcggccccaagtgcaacttcaagaatcaggcgcaggacttctcaagccatccgaaacactctccctcacttgcgcggtgtacgggggaagcttctcgggatactactggtcctggattaggcagcctcccggcaaaggcctggaatgggtcggggagatcaaccactccggttcaaccaactacaacccgtcgctgaagtcccgcgtgaccatttccgtggacacctctaagaatcagttcagcctgaagctctcgtccgtgaccgcggcggacaccgccgtctactactgcgctcggggatcaggactggtggtgtacgccatccgcgtgggctcgggctggttcgattactggggccagggaaccctggtcactgtgtcgtccggcggaggaggttcggggggcggagacagcggtggagggggtagcgacatccagatgacccagtccccgtcctcgctgtccgcctccgtgggagatagagtgaccatcacctgtcgggcatcccagagcatttccagctacctgaactggtatcagcagaagcccggaaaggcccctaagctgttgatgtacgccgccagcagcttgcagtcgggcgtgccgagccggttttccggttccggctccgggactgacttcaccctgactatctcatccctgcaacccgaggacttcgccacttattactgccagcagtcctactcaacccctccctggacgttcggacagggcaccaaggtcgatatcaagaccactaccccagcaccgaggccacccaccccggctcctaccatcgcctcccagcctctgtccctgcgtccggaggcatgtagacccgcagctggtggggccgtgcatacccggggtcttgacttcgcctgcgatatctacatttgggcccctctggctggtacttgcggggtcctgctgctttcactcgtgatcactctttactgtaagcgcggtcggaagaagctgctgtacatctttaagcaacccttcatgaggcctgtgcagactactcaagaggaggacggctgttcatgccggttcccagaggaggaggaaggcggctgcgaactgcgcgtgaaattcagccgcagcgcagatgctccagcctacaagcaggggcagaaccagctctacaacgaactcaatcttggtcggagagaggagtacgacgtgctggacaagcggagaggacgggacccagaaatgggcgggaagccgcgcagaaagaatccccaagagggcctgtacaacgagctccaaaaggataagatggcagaagcctatagcgagattggtatgaaaggggaacgcagaagaggcaaaggccacgacggactgtaccagggactcagcaccgccaccaaggacacctatgacgctcttcacatgcaggccctgccgcctcgg

SEQ ID NO: 2301 - protein, 255 aa, Artificial Sequence
  source: /note="Description of Artificial Sequence: Synthetic polypeptide"
EVQLVESGGGLVKPGGSLRLSCAASGFTFSSYSMNWVRQAPGKGLEWVSSISSSSSYIYYADSVKGRFTISRDNAKNSLYLQMNSLRAEDTAVYYCARDPSSSGSYYMEDSYYYGMDVWGQGTTVTVSSGGGGSGGGGSGGGGSNFMLTQPHSVSESPGKTVTISCTGSSGSIASNYVQWYQQRPGSAPTTVIYEDNQRPSGVPDRFSGSIDSSSNSASLTISGLKTEDEADYYCQSYDSSNQVVFGGGTKLTVL

SEQ ID NO: 2302 - DNA, 765 bp, Artificial Sequence
  source: /note="Description of Artificial Sequence: Synthetic polynucleotide"
gaagtgcaattggtggaatctggaggaggacttgtgaaacctggtggaagcctgagactttcctgtgcggcctcgggattcactttctcctcctactccatgaactgggtcagacaggcccctgggaagggactggaatgggtgtcatccatctcctcctcatcgtcgtacatctactacgccgatagcgtgaaggggcggttcaccatttcccgggacaacgctaagaacagcctctatctgcaaatgaattccctccgcgccgaggacactgccgtgtactactgcgcgagggacccctcatcaagcggcagctactacatggaggactcgtattactacggaatggacgtctggggccagggaaccactgtgacggtgtcctccggtggagggggctccgggggcgggggatctggcggaggaggctccaacttcatgctgacccagccgcactccgtgtccgaaagccccggaaagaccgtgacaatttcctgcaccgggtcctccggctcgatcgcatcaaactacgtgcagtggtaccagcagcgcccgggcagcgcccccaccactgtcatctacgaggataaccagcggccgtcgggtgtcccagaccggttttccggttcgatcgatagcagcagcaacagcgcctccctgaccatttccggcctcaagaccgaggatgaggctgactactactgccagtcgtatgactcctcgaaccaagtggtgttcggtggcggcaccaagctgactgtgctg

SEQ ID NO: 2303 - protein, 129 aa, Artificial Sequence
  source: /note="Description of Artificial Sequence: Synthetic polypeptide"
EVQLVESGGGLVKPGGSLRLSCAASGFTFSSYSMNWVRQAPGKGLEWVSSISSSSSYIYYADSVKGRFTISRDNAKNSLYLQMNSLRAEDTAVYYCARDPSSSGSYYMEDSYYYGMDVWGQGTTVTVSS

SEQ ID NO: 2304 - protein, 111 aa, Artificial Sequence
  source: /note="Description of Artificial Sequence: Synthetic polypeptide"
NFMLTQPHSVSESPGKTVTISCTGSSGSIASNYVQWYQQRPGSAPTTVIYEDNQRPSGVPDRFSGSIDSSSNSASLTISGLKTEDEADYYCQSYDSSNQVVFGGGTKLTVL

SEQ ID NO: 2305 - protein, 499 aa, Artificial Sequence
  source: /note="Description of Artificial Sequence: Synthetic polypeptide"
MALPVTALLLPLALLLHAARPEVQLVESGGGLVKPGGSLRLSCAASGFTFSSYSMNWVRQAPGKGLEWVSSISSSSSYIYYADSVKGRFTISRDNAKNSLYLQMNSLRAEDTAVYYCARDPSSSGSYYMEDSYYYGMDVWGQGTTVTVSSGGGGSGGGGSGGGGSNFMLTQPHSVSESPGKTVTISCTGSSGSIASNYVQWYQQRPGSAPTTVIYEDNQRPSGVPDRFSGSIDSSSNSASLTISGLKTEDEADYYCQSYDSSNQVVFGGGTKLTVLTTTPAPRPPTPAPTIASQPLSLRPEACRPAAGGAVHTRGLDFACDIYIWAPLAGTCGVLLLSLVITLYCKRGRKKLLYIFKQPFMRPVQTTQEEDGCSCRFPEEEEGGCELRVKFSRSADAPAYKQGQNQLYNELNLGRREEYDVLDKRRGRDPEMGGKPRRKNPQEGLYNELQKDKMAEAYSEIGMKGERRRGKGHDGLYQGLSTATKDTYDALHMQALPPR

SEQ ID NO: 2306 - DNA, 1497 bp, Artificial Sequence
  source: /note="Description of Artificial Sequence: Synthetic polynucleotide"
atggccctccctgtcaccgccctgctgcttccgctggctcttctgctccacgccgctcggcccgaagtgcaattggtggaatctggaggaggacttgtgaaacctggtggaagcctgagactttcctgtgcggcctcgggattcactttctcctcctactccatgaactgggtcagacaggcccctgggaagggactggaatgggtgtcatccatctcctcctcatcgtcgtacatctactacgccgatagcgtgaaggggcggttcaccatttcccgggacaacgctaagaacagcctctatctgcaaatgaattccctccgcgccgaggacactgccgtgtactactgcgcgagggacccctcatcaagcggcagctactacatggaggactcgtattactacggaatggacgtctggggccagggaaccactgtgacggtgtcctccggtggagggggctccgggggcgggggatctggcggaggaggctccaacttcatgctgacccagccgcactccgtgtccgaaagccccggaaagaccgtgacaatttcctgcaccgggtcctccggctcgatcgcatcaaactacgtgcagtggtaccagcagcgcccgggcagcgcccccaccactgtcatctacgaggataaccagcggccgtcgggtgtcccagaccggttttccggttcgatcgatagcagcagcaacagcgcctccctgaccatttccggcctcaagaccgaggatgaggctgactactactgccagtcgtatgactcctcgaaccaagtggtgttcggtggcggcaccaagctgactgtgctgaccactaccccagcaccgaggccacccaccccggctcctaccatcgcctcccagcctctgtccctgcgtccggaggcatgtagacccgcagctggtggggccgtgcatacccggggtcttgacttcgcctgcgatatctacatttgggcccctctggctggtacttgcggggtcctgctgctttcactcgtgatcactctttactgtaagcgcggtcggaagaagctgctgtacatctttaagcaacccttcatgaggcctgtgcagactactcaagaggaggacggctgttcatgccggttcccagaggaggaggaaggcggctgcgaactgcgcgtgaaattcagccgcagcgcagatgctccagcctacaagcaggggcagaaccagctctacaacgaactcaatcttggtcggagagaggagtacgacgtgctggacaagcggagaggacgggacccagaaatgggcgggaagccgcgcagaaagaatccccaagagggcctgtacaacgagctccaaaaggataagatggcagaagcctatagcgagattggtatgaaaggggaacgcagaagaggcaaaggccacgacggactgtaccagggactcagcaccgccaccaaggacacctatgacgctcttcacatgcaggccctgccgcctcgg

SEQ ID NO: 2307 - protein, 239 aa, Artificial Sequence
  source: /note="Description of Artificial Sequence: Synthetic polypeptide"
QVNLRESGGGLVQPGGSLRLSCAASGFTFSSYEMNWVRQAPGKGLEWVSYISSSGSTIYYADSVKGRFTISRDNAKNSLYLQMNSLRAEDTAVYYCAREALGSSWEWGQGTTVTVSSGGGGSGGGGSGGGGSDIQMTQSPSSLSASVGDRVTITCQASQDISNYLNWYQQKPGKAPKLLIYDASNLETGVPSRFSGSGSGTDFTFTISSLQPEDIATYYCQQYDNLPLTFGGGTKLEIK

SEQ ID NO: 2308 - DNA, 717 bp, Artificial Sequence
  source: /note="Description of Artificial Sequence: Synthetic polynucleotide"
caagtgaacctgagagaaagcggcggaggacttgtgcaacctggaggaagcctgagactgtcatgtgccgcgtccggcttcaccttctcgtcctacgagatgaactgggtccgccaggcaccgggcaaaggactggaatgggtgtcctacatttcctcgtccgggtccaccatctattacgccgactccgtgaagggacggttcaccatctcccgggacaacgccaagaactccctctacctccaaatgaactcactgagggcagaggacactgcggtctactactgcgcccgcgaagctttgggtagctcctgggagtggggccagggaaccactgtgaccgtgtcctcgggtggagggggctccggtggcgggggttcagggggtggcggaagcgatatccagatgactcagtcaccaagctccctgagcgcctcagtgggagatcgggtcacaatcacgtgccaggcgtcccaggacatttctaactacctcaattggtaccagcagaagccggggaaggcccccaagcttctgatctacgatgcctccaacctggaaaccggcgtgccctcccgcttctcgggatcgggcagcggcactgacttcacctttaccatctcgtccctgcaacctgaggacatcgccacctattactgccagcagtacgataacctcccgctgactttcggaggcggaactaagctggagattaag

SEQ ID NO: 2309 - protein, 117 aa, Artificial Sequence
  source: /note="Description of Artificial Sequence: Synthetic polypeptide"
QVNLRESGGGLVQPGGSLRLSCAASGFTFSSYEMNWVRQAPGKGLEWVSYISSSGSTIYYADSVKGRFTISRDNAKNSLYLQMNSLRAEDTAVYYCAREALGSSWEWGQGTTVTVSS

SEQ ID NO: 2310 - protein, 107 aa, Artificial Sequence
  source: /note="Description of Artificial Sequence: Synthetic polypeptide"
DIQMTQSPSSLSASVGDRVTITCQASQDISNYLNWYQQKPGKAPKLLIYDASNLETGVPSRFSGSGSGTDFTFTISSLQPEDIATYYCQQYDNLPLTFGGGTKLEIK

SEQ ID NO: 2311 - protein, 483 aa, Artificial Sequence
  source: /note="Description of Artificial Sequence: Synthetic polypeptide"
MALPVTALLLPLALLLHAARPQVNLRESGGGLVQPGGSLRLSCAASGFTFSSYEMNWVRQAPGKGLEWVSYISSSGSTIYYADSVKGRFTISRDNAKNSLYLQMNSLRAEDTAVYYCAREALGSSWEWGQGTTVTVSSGGGGSGGGGSGGGGSDIQMTQSPSSLSASVGDRVTITCQASQDISNYLNWYQQKPGKAPKLLIYDASNLETGVPSRFSGSGSGTDFTFTISSLQPEDIATYYCQQYDNLPLTFGGGTKLEIKTTTPAPRPPTPAPTIASQPLSLRPEACRPAAGGAVHTRGLDFACDIYIWAPLAGTCGVLLLSLVITLYCKRGRKKLLYIFKQPFMRPVQTTQEEDGCSCRFPEEEEGGCELRVKFSRSADAPAYKQGQNQLYNELNLGRREEYDVLDKRRGRDPEMGGKPRRKNPQEGLYNELQKDKMAEAYSEIGMKGERRRGKGHDGLYQGLSTATKDTYDALHMQALPPR

SEQ ID NO: 2312 - DNA, 1449 bp, Artificial Sequence
  source: /note="Description of Artificial Sequence: Synthetic polynucleotide"
atggccctccctgtcaccgccctgctgcttccgctggctcttctgctccacgccgctcggccccaagtgaacctgagagaaagcggcggaggacttgtgcaacctggaggaagcctgagactgtcatgtgccgcgtccggcttcaccttctcgtcctacgagatgaactgggtccgccaggcaccgggcaaaggactggaatgggtgtcctacatttcctcgtccgggtccaccatctattacgccgactccgtgaagggacggttcaccatctcccgggacaacgccaagaactccctctacctccaaatgaactcactgagggcagaggacactgcggtctactactgcgcccgcgaagctttgggtagctcctgggagtggggccagggaaccactgtgaccgtgtcctcgggtggagggggctccggtggcgggggttcagggggtggcggaagcgatatccagatgactcagtcaccaagctccctgagcgcctcagtgggagatcgggtcacaatcacgtgccaggcgtcccaggacatttctaactacctcaattggtaccagcagaagccggggaaggcccccaagcttctgatctacgatgcctccaacctggaaaccggcgtgccctcccgcttctcgggatcgggcagcggcactgacttcacctttaccatctcgtccctgcaacctgaggacatcgccacctattactgccagcagtacgataacctcccgctgactttcggaggcggaactaagctggagattaagaccactaccccagcaccgaggccacccaccccggctcctaccatcgcctcccagcctctgtccctgcgtccggaggcatgtagacccgcagctggtggggccgtgcatacccggggtcttgacttcgcctgcgatatctacatttgggcccctctggctggtacttgcggggtcctgctgctttcactcgtgatcactctttactgtaagcgcggtcggaagaagctgctgtacatctttaagcaacccttcatgaggcctgtgcagactactcaagaggaggacggctgttcatgccggttcccagaggaggaggaaggcggctgcgaactgcgcgtgaaattcagccgcagcgcagatgctccagcctacaagcaggggcagaaccagctctacaacgaactcaatcttggtcggagagaggagtacgacgtgctggacaagcggagaggacgggacccagaaatgggcgggaagccgcgcagaaagaatccccaagagggcctgtacaacgagctccaaaaggataagatggcagaagcctatagcgagattggtatgaaaggggaacgcagaagaggcaaaggccacgacggactgtaccagggactcagcaccgccaccaaggacacctatgacgctcttcacatgcaggccctgccgcctcgg

SEQ ID NO: 2313 - protein, 246 aa, Artificial Sequence
  source: /note="Description of Artificial Sequence: Synthetic polypeptide"
QVQLVQSGAEVKEPGASVKVSCKAPANTFSDHVMHWVRQAPGQRFEWMGYIHAANGGTHYSQKFQDRVTITRDTSANTVYMDLSSLRSEDTAVYYCARGGYNSDAFDIWGQGTMVTVSSGGGGSGGGGSGGGGSGGGGSDIVMTQSPSSVSASVGDRVTITCRASQDISSWLAWYQQKPGKAPKLLIYAASSLQSGVPSRFNGSGSGTDFTLTISSLQPEDFATYYCQQSYSTPLTFGGGTKVEIK

SEQ ID NO: 2314 - DNA, 738 bp, Artificial Sequence
  source: /note="Description of Artificial Sequence: Synthetic polynucleotide"
caagtgcaactcgtccagtccggtgcagaagtcaaggaacccggagcctccgtgaaagtgtcctgcaaagctcctgccaacactttctcggaccacgtgatgcactgggtgcgccaggcgccgggccagcgcttcgaatggatgggatacattcatgccgccaatggcggtacccactactcccaaaagttccaggatagagtcaccatcacccgggacaccagcgccaacaccgtgtatatggatctgtccagcctgaggtccgaggataccgccgtgtactactgcgcccggggcggatacaactcagacgcgttcgacatttggggacagggtactatggtcaccgtgtcatccgggggcggtggcagcgggggcggaggctctggcggaggcggatcagggggaggagggtccgacatcgtgatgacccagtccccgtcatcggtgtccgcgtccgtgggagacagagtgaccatcacgtgtcgcgccagccaggacatctcctcgtggttggcatggtaccagcagaagcctggaaaggccccgaagctgctcatctacgccgcctcctcccttcaatcgggagtgccctcgcggttcaacggaagcggaagcgggacagattttaccctgactattagctcgctgcagcccgaggacttcgctacttactactgccaacagagctactccaccccactgactttcggcgggggtaccaaggtcgagatcaag

SEQ ID NO: 2315 - protein, 119 aa, Artificial Sequence
  source: /note="Description of Artificial Sequence: Synthetic polypeptide"
QVQLVQSGAEVKEPGASVKVSCKAPANTFSDHVMHWVRQAPGQRFEWMGYIHAANGGTHYSQKFQDRVTITRDTSANTVYMDLSSLRSEDTAVYYCARGGYNSDAFDIWGQGTMVTVSS

SEQ ID NO: 2316 - protein, 107 aa, Artificial Sequence
  source: /note="Description of Artificial Sequence: Synthetic polypeptide"
DIVMTQSPSSVSASVGDRVTITCRASQDISSWLAWYQQKPGKAPKLLIYAASSLQSGVPSRFNGSGSGTDFTLTISSLQPEDFATYYCQQSYSTPLTFGGGTKVEIK

SEQ ID NO: 2317 - protein, 490 aa, Artificial Sequence
  source: /note="Description of Artificial Sequence: Synthetic polypeptide"
MALPVTALLLPLALLLHAARPQVQLVQSGAEVKEPGASVKVSCKAPANTFSDHVMHWVRQAPGQRFEWMGYIHAANGGTHYSQKFQDRVTITRDTSANTVYMDLSSLRSEDTAVYYCARGGYNSDAFDIWGQGTMVTVSSGGGGSGGGGSGGGGSGGGGSDIVMTQSPSSVSASVGDRVTITCRASQDISSWLAWYQQKPGKAPKLLIYAASSLQSGVPSRFNGSGSGTDFTLTISSLQPEDFATYYCQQSYSTPLTFGGGTKVEIKTTTPAPRPPTPAPTIASQPLSLRPEACRPAAGGAVHTRGLDFACDIYIWAPLAGTCGVLLLSLVITLYCKRGRKKLLYIFKQPFMRPVQTTQEEDGCSCRFPEEEEGGCELRVKFSRSADAPAYKQGQNQLYNELNLGRREEYDVLDKRRGRDPEMGGKPRRKNPQEGLYNELQKDKMAEAYSEIGMKGERRRGKGHDGLYQGLSTATKDTYDALHMQALPPR

SEQ ID NO: 2318 - DNA, 1470 bp, Artificial Sequence
  source: /note="Description of Artificial Sequence: Synthetic polynucleotide"
atggccctccctgtcaccgccctgctgcttccgctggctcttctgctccacgccgctcggccccaagtgcaactcgtccagtccggtgcagaagtcaaggaacccggagcctccgtgaaagtgtcctgcaaagctcctgccaacactttctcggaccacgtgatgcactgggtgcgccaggcgccgggccagcgcttcgaatggatgggatacattcatgccgccaatggcggtacccactactcccaaaagttccaggatagagtcaccatcacccgggacaccagcgccaacaccgtgtatatggatctgtccagcctgaggtccgaggataccgccgtgtactactgcgcccggggcggatacaactcagacgcgttcgacatttggggacagggtactatggtcaccgtgtcatccgggggcggtggcagcgggggcggaggctctggcggaggcggatcagggggaggagggtccgacatcgtgatgacccagtccccgtcatcggtgtccgcgtccgtgggagacagagtgaccatcacgtgtcgcgccagccaggacatctcctcgtggttggcatggtaccagcagaagcctggaaaggccccgaagctgctcatctacgccgcctcctcccttcaatcgggagtgccctcgcggttcaacggaagcggaagcgggacagattttaccctgactattagctcgctgcagcccgaggacttcgctacttactactgccaacagagctactccaccccactgactttcggcgggggtaccaaggtcgagatcaagaccactaccccagcaccgaggccacccaccccggctcctaccatcgcctcccagcctctgtccctgcgtccggaggcatgtagacccgcagctggtggggccgtgcatacccggggtcttgacttcgcctgcgatatctacatttgggcccctctggctggtacttgcggggtcctgctgctttcactcgtgatcactctttactgtaagcgcggtcggaagaagctgctgtacatctttaagcaacccttcatgaggcctgtgcagactactcaagaggaggacggctgttcatgccggttcccagaggaggaggaaggcggctgcgaactgcgcgtgaaattcagccgcagcgcagatgctccagcctacaagcaggggcagaaccagctctacaacgaactcaatcttggtcggagagaggagtacgacgtgctggacaagcggagaggacgggacccagaaatgggcgggaagccgcgcagaaagaatccccaagagggcctgtacaacgagctccaaaaggataagatggcagaagcctatagcgagattggtatgaaaggggaacgcagaagaggcaaaggccacgacggactgtaccagggactcagcaccgccaccaaggacacctatgacgctcttcacatgcaggccctgccgcctcgg

SEQ ID NO: 2319 - protein, 248 aa, Artificial Sequence
  source: /note="Description of Artificial Sequence: Synthetic polypeptide"
QVQLVQSGGGLVQPGGSLRLSCAASGFTFSSYSMNWVRQAPGKGLEWVSYISSSSSTIYYADSVKGRFTISRDNAKNSLYLQMNSLRAEDTAVYYCARDLSVRAIDAFDIWGQGTMVTVSSGGGGSGGGGSGGGGSGGGGSDIVLTQSPSSLSASVGDRVTITCQASQDISNYLNWYQQKPGKAPKLLIYDASNLETGVPSRFSGSGSGTDFTFTISSLQPEDFATYYCQQAYSTPFTFGPGTKVEIK

SEQ ID NO: 2320 - DNA, 744 bp, Artificial Sequence
  source: /note="Description of Artificial Sequence: Synthetic polynucleotide"
caagtgcaacttgttcaatccggtggaggtcttgtgcagcccggaggatcactcagactgtcgtgcgccgcctctgggttcactttctcctcatactcgatgaactgggtgcgccaggcgccgggaaagggcctggaatgggtgtcatacatctcctcctcatcctccaccatctactacgccgattccgtgaagggccgcttcactatttcccgggacaacgcgaaaaactcgctctatctgcaaatgaactccctgcgcgccgaggacaccgccgtgtactactgcgcccgggacctgagcgtgcgggctattgatgcgttcgacatctggggacagggcaccatggtcacagtgtccagcggaggcggcggcagcggtggaggaggatcagggggaggaggttcggggggcggtggctccgatatcgtgctgacccagagcccgtcgagcctctccgcctccgtcggcgacagagtgaccatcacgtgtcaggcatcccaggacattagcaactacctgaattggtaccagcagaagcctggaaaggcacccaagttgctgatctacgacgcctccaacctggaaaccggagtgccatccaggttctcgggcagcggctcgggaaccgacttcacttttactatctcctccctgcaacccgaggatttcgcgacctactactgccagcaggcctacagcacccctttcaccttcgggccgggaactaaggtcgaaatcaag

SEQ ID NO: 2321 - protein, 121 aa, Artificial Sequence
  source: /note="Description of Artificial Sequence: Synthetic polypeptide"
QVQLVQSGGGLVQPGGSLRLSCAASGFTFSSYSMNWVRQAPGKGLEWVSYISSSSSTIYYADSVKGRFTISRDNAKNSLYLQMNSLRAEDTAVYYCARDLSVRAIDAFDIWGQGTMVTVSS

SEQ ID NO: 2322 - protein, 107 aa, Artificial Sequence
  source: /note="Description of Artificial Sequence: Synthetic polypeptide"
DIVLTQSPSSLSASVGDRVTITCQASQDISNYLNWYQQKPGKAPKLLIYDASNLETGVPSRFSGSGSGTDFTFTISSLQPEDFATYYCQQAYSTPFTFGPGTKVEIK

SEQ ID NO: 2323 - protein, 492 aa, Artificial Sequence
  source: /note="Description of Artificial Sequence: Synthetic polypeptide"
MALPVTALLLPLALLLHAARPQVQLVQSGGGLVQPGGSLRLSCAASGFTFSSYSMNWVRQAPGKGLEWVSYISSSSSTIYYADSVKGRFTISRDNAKNSLYLQMNSLRAEDTAVYYCARDLSVRAIDAFDIWGQGTMVTVSSGGGGSGGGGSGGGGSGGGGSDIVLTQSPSSLSASVGDRVTITCQASQDISNYLNWYQQKPGKAPKLLIYDASNLETGVPSRFSGSGSGTDFTFTISSLQPEDFATYYCQQAYSTPFTFGPGTKVEIKTTTPAPRPPTPAPTIASQPLSLRPEACRPAAGGAVHTRGLDFACDIYIWAPLAGTCGVLLLSLVITLYCKRGRKKLLYIFKQPFMRPVQTTQEEDGCSCRFPEEEEGGCELRVKFSRSADAPAYKQGQNQLYNELNLGRREEYDVLDKRRGRDPEMGGKPRRKNPQEGLYNELQKDKMAEAYSEIGMKGERRRGKGHDGLYQGLSTATKDTYDALHMQALPPR

SEQ ID NO: 2324 - DNA, 1476 bp, Artificial Sequence
  source: /note="Description of Artificial Sequence: Synthetic polynucleotide"
atggccctccctgtcaccgccctgctgcttccgctggctcttctgctccacgccgctcggccccaagtgcaacttgttcaatccggtggaggtcttgtgcagcccggaggatcactcagactgtcgtgcgccgcctctgggttcactttctcctcatactcgatgaactgggtgcgccaggcgccgggaaagggcctggaatgggtgtcatacatctcctcctcatcctccaccatctactacgccgattccgtgaagggccgcttcactatttcccgggacaacgcgaaaaactcgctctatctgcaaatgaactccctgcgcgccgaggacaccgccgtgtactactgcgcccgggacctgagcgtgcgggctattgatgcgttcgacatctggggacagggcaccatggtcacagtgtccagcggaggcggcggcagcggtggaggaggatcagggggaggaggttcggggggcggtggctccgatatcgtgctgacccagagcccgtcgagcctctccgcctccgtcggcgacagagtgaccatcacgtgtcaggcatcccaggacattagcaactacctgaattggtaccagcagaagcctggaaaggcacccaagttgctgatctacgacgcctccaacctggaaaccggagtgccatccaggttctcgggcagcggctcgggaaccgacttcacttttactatctcctccctgcaacccgaggatttcgcgacctactactgccagcaggcctacagcacccctttcaccttcgggccgggaactaaggtcgaaatcaagaccactaccccagcaccgaggccacccaccccggctcctaccatcgcctcccagcctctgtccctgcgtccggaggcatgtagacccgcagctggtggggccgtgcatacccggggtcttgacttcgcctgcgatatctacatttgggcccctctggctggtacttgcggggtcctgctgctttcactcgtgatcactctttactgtaagcgcggtcggaagaagctgctgtacatctttaagcaacccttcatgaggcctgtgcagactactcaagaggaggacggctgttcatgccggttcccagaggaggaggaaggcggctgcgaactgcgcgtgaaattcagccgcagcgcagatgctccagcctacaagcaggggcagaaccagctctacaacgaactcaatcttggtcggagagaggagtacgacgtgctggacaagcggagaggacgggacccagaaatgggcgggaagccgcgcagaaagaatccccaagagggcctgtacaacgagctccaaaaggataagatggcagaagcctatagcgagattggtatgaaaggggaacgcagaagaggcaaaggccacgacggactgtaccagggactcagcaccgccaccaaggacacctatgacgctcttcacatgcaggccctgccgcctcgg

SEQ ID NO: 2325 - protein, 246 aa, Artificial Sequence
  source: /note="Description of Artificial Sequence: Synthetic polypeptide"
EVQLVQSGGGVVRSGRSLRLSCAASGFTFNSYGLHWVRQAPGKGLEWVALIEYDGSNKYYGDSVKGRFTISRDKSKSTLYLQMDNLRAEDTAVYYCAREGNEDLAFDIWGQGTLVTVSSGGGGSGGGGSGGGGSGGGGSEIVLTQSPSSLSASVGDRVTITCQASQFIKKNLNWYQHKPGKAPKLLIYDASSLQTGVPSRFSGNRSGTTFSFTISSLQPEDVATYYCQQHDNLPLTFGGGTKVEIK

SEQ ID NO: 2326 - DNA, 738 bp, Artificial Sequence
  source: /note="Description of Artificial Sequence: Synthetic polynucleotide"
gaagtgcaattggtgcaatcaggaggaggagtggtcagatctggaagaagcctgagactgtcatgcgcggcttcgggctttaccttcaactcctacggcctccactgggtgcgccaggcccccggaaaaggcctcgaatgggtcgcactgattgagtacgacgggtccaacaagtactacggagatagcgtgaagggccgcttcaccatctcacgggacaagtccaagtccaccctgtatctgcaaatggacaacctgagggccgaggatactgccgtgtactactgcgcccgcgaaggaaacgaagatctggccttcgatatttggggccagggtactcttgtgaccgtgtcgagcggaggcggaggctccggtggaggaggatcggggggtggtggttccggcggcggggggagcgaaatcgtgctgacccagtcgccttcctccctctccgcttccgtgggggaccgggtcactattacgtgtcaggcgtcccaattcatcaagaagaatctgaactggtaccagcacaagccgggaaaggcccccaaactgctcatctacgacgccagctcgctgcagactggcgtgccttcccggttttccgggaaccggtcgggaaccaccttctcattcaccatcagcagcctccagccggaggacgtggcgacctactactgccagcagcatgacaaccttccactgactttcggcgggggcaccaaggtcgagattaag

SEQ ID NO: 2327 - protein, 119 aa, Artificial Sequence
  source: /note="Description of Artificial Sequence: Synthetic polypeptide"
EVQLVQSGGGVVRSGRSLRLSCAASGFTFNSYGLHWVRQAPGKGLEWVALIEYDGSNKYYGDSVKGRFTISRDKSKSTLYLQMDNLRAEDTAVYYCAREGNEDLAFDIWGQGTLVTVSS

SEQ ID NO: 2328 - protein, 107 aa, Artificial Sequence
  source: /note="Description of Artificial Sequence: Synthetic polypeptide"
EIVLTQSPSSLSASVGDRVTITCQASQFIKKNLNWYQHKPGKAPKLLIYDASSLQTGVPSRFSGNRSGTTFSFTISSLQPEDVATYYCQQHDNLPLTFGGGTKVEIK

SEQ ID NO: 2329 - protein, 490 aa, Artificial Sequence
  source: /note="Description of Artificial Sequence: Synthetic polypeptide"
MALPVTALLLPLALLLHAARPEVQLVQSGGGVVRSGRSLRLSCAASGFTFNSYGLHWVRQAPGKGLEWVALIEYDGSNKYYGDSVKGRFTISRDKSKSTLYLQMDNLRAEDTAVYYCAREGNEDLAFDIWGQGTLVTVSSGGGGSGGGGSGGGGSGGGGSEIVLTQSPSSLSASVGDRVTITCQASQFIKKNLNWYQHKPGKAPKLLIYDASSLQTGVPSRFSGNRSGTTFSFTISSLQPEDVATYYCQQHDNLPLTFGGGTKVEIKTTTPAPRPPTPAPTIASQPLSLRPEACRPAAGGAVHTRGLDFACDIYIWAPLAGTCGVLLLSLVITLYCKRGRKKLLYIFKQPFMRPVQTTQEEDGCSCRFPEEEEGGCELRVKFSRSADAPAYKQGQNQLYNELNLGRREEYDVLDKRRGRDPEMGGKPRRKNPQEGLYNELQKDKMAEAYSEIGMKGERRRGKGHDGLYQGLSTATKDTYDALHMQALPPR

SEQ ID NO: 2330 - DNA, 1470 bp, Artificial Sequence
  source: /note="Description of Artificial Sequence: Synthetic polynucleotide"
atggccctccctgtcaccgccctgctgcttccgctggctcttctgctccacgccgctcggcccgaagtgcaattggtgcaatcaggaggaggagtggtcagatctggaagaagcctgagactgtcatgcgcggcttcgggctttaccttcaactcctacggcctccactgggtgcgccaggcccccggaaaaggcctcgaatgggtcgcactgattgagtacgacgggtccaacaagtactacggagatagcgtgaagggccgcttcaccatctcacgggacaagtccaagtccaccctgtatctgcaaatggacaacctgagggccgaggatactgccgtgtactactgcgcccgcgaaggaaacgaagatctggccttcgatatttggggccagggtactcttgtgaccgtgtcgagcggaggcggaggctccggtggaggaggatcggggggtggtggttccggcggcggggggagcgaaatcgtgctgacccagtcgccttcctccctctccgcttccgtgggggaccgggtcactattacgtgtcaggcgtcccaattcatcaagaagaatctgaactggtaccagcacaagccgggaaaggcccccaaactgctcatctacgacgccagctcgctgcagactggcgtgccttcccggttttccgggaaccggtcgggaaccaccttctcattcaccatcagcagcctccagccggaggacgtggcgacctactactgccagcagcatgacaaccttccactgactttcggcgggggcaccaaggtcgagattaagaccactaccccagcaccgaggccacccaccccggctcctaccatcgcctcccagcctctgtccctgcgtccggaggcatgtagacccgcagctggtggggccgtgcatacccggggtcttgacttcgcctgcgatatctacatttgggcccctctggctggtacttgcggggtcctgctgctttcactcgtgatcactctttactgtaagcgcggtcggaagaagctgctgtacatctttaagcaacccttcatgaggcctgtgcagactactcaagaggaggacggctgttcatgccggttcccagaggaggaggaaggcggctgcgaactgcgcgtgaaattcagccgcagcgcagatgctccagcctacaagcaggggcagaaccagctctacaacgaactcaatcttggtcggagagaggagtacgacgtgctggacaagcggagaggacgggacccagaaatgggcgggaagccgcgcagaaagaatccccaagagggcctgtacaacgagctccaaaaggataagatggcagaagcctatagcgagattggtatgaaaggggaacgcagaagaggcaaaggccacgacggactgtaccagggactcagcaccgccaccaaggacacctatgacgctcttcacatgcaggccctgccgcctcgg

SEQ ID NO: 2331 - protein, 255 aa, Artificial Sequence
  source: /note="Description of Artificial Sequence: Synthetic polypeptide"
QVQLVESGGGLVQPGGSLRLSCAASGFNVSSNYMTWVRQAPGKGLEWVSVIYSGGATYYGDSVKGRFTVSRDNSKNTVYLQMNRLTAEDTAVYYCARDRLYCGNNCYLYYYYGMDVWGQGTLVTVSSGGGGSGGGGSGGGGSGGGGSDIQVTQSPSSLSASVGDRVTITCRASQSISSYLNWYQQKPGKAPKLLIYAASSLQSGVPSRFSGSGSGTDFTLTISSLQPEDFATYYCQQSYSTPPLTFGQGTKVEIK

SEQ ID NO: 2332 - DNA, 765 bp, Artificial Sequence
  source: /note="Description of Artificial Sequence: Synthetic polynucleotide"
caagtgcaactcgtggaatcaggcggaggactcgtgcaacccggaggttcccttagactgtcatgtgccgcttccgggttcaatgtgtccagcaactacatgacctgggtcagacaggcgccgggaaagggacttgaatgggtgtccgtgatctactccggtggagcaacatactacggagactccgtgaaaggccgctttaccgtgtcccgcgataactcgaagaacaccgtgtacttgcagatgaacaggctgactgccgaggacaccgccgtgtattattgcgcccgggacaggctgtactgtggaaacaactgctacctgtactactactacgggatggacgtgtggggacagggcactctcgtcactgtgtcatccggggggggcggtagcggtggcggagggtccggcggaggaggctcagggggaggcggaagcgatatccaggtcacccagtctccctcctcgctgtccgcctccgtgggcgaccgcgtcaccattacttgccgggcgtcgcagtcgatcagctcctacctgaactggtaccagcagaagcctggaaaggccccgaagctgctgatctacgcggcctcgtccctgcaaagcggcgtcccgtcgcggttcagcggttccggttcgggaaccgacttcaccctgactatttcctccctgcaacccgaggatttcgccacttactactgccagcagtcctactccaccccacctctgaccttcggccaaggaaccaaggtcgaaatcaag

SEQ ID NO: 2333 - protein, 127 aa, Artificial Sequence
  source: /note="Description of Artificial Sequence: Synthetic polypeptide"
QVQLVESGGGLVQPGGSLRLSCAASGFNVSSNYMTWVRQAPGKGLEWVSVIYSGGATYYGDSVKGRFTVSRDNSKNTVYLQMNRLTAEDTAVYYCARDRLYCGNNCYLYYYYGMDVWGQGTLVTVSS

SEQ ID NO: 2334 - protein, 108 aa, Artificial Sequence
  source: /note="Description of Artificial Sequence: Synthetic polypeptide"
DIQVTQSPSSLSASVGDRVTITCRASQSISSYLNWYQQKPGKAPKLLIYAASSLQSGVPSRFSGSGSGTDFTLTISSLQPEDFATYYCQQSYSTPPLTFGQGTKVEIK

SEQ ID NO: 2335 - protein, 499 aa, Artificial Sequence
  source: /note="Description of Artificial Sequence: Synthetic polypeptide"
MALPVTALLLPLALLLHAARPQVQLVESGGGLVQPGGSLRLSCAASGFNVSSNYMTWVRQAPGKGLEWVSVIYSGGATYYGDSVKGRFTVSRDNSKNTVYLQMNRLTAEDTAVYYCARDRLYCGNNCYLYYYYGMDVWGQGTLVTVSSGGGGSGGGGSGGGGSGGGGSDIQVTQSPSSLSASVGDRVTITCRASQSISSYLNWYQQKPGKAPKLLIYAASSLQSGVPSRFSGSGSGTDFTLTISSLQPEDFATYYCQQSYSTPPLTFGQGTKVEIKTTTPAPRPPTPAPTIASQPLSLRPEACRPAAGGAVHTRGLDFACDIYIWAPLAGTCGVLLLSLVITLYCKRGRKKLLYIFKQPFMRPVQTTQEEDGCSCRFPEEEEGGCELRVKFSRSADAPAYKQGQNQLYNELNLGRREEYDVLDKRRGRDPEMGGKPRRKNPQEGLYNELQKDKMAEAYSEIGMKGERRRGKGHDGLYQGLSTATKDTYDALHMQALPPR

SEQ ID NO: 2336 - DNA, 1497 bp, Artificial Sequence
  source: /note="Description of Artificial Sequence: Synthetic polynucleotide"
atggccctccctgtcaccgccctgctgcttccgctggctcttctgctccacgccgctcggccccaagtgcaactcgtggaatcaggcggaggactcgtgcaacccggaggttcccttagactgtcatgtgccgcttccgggttcaatgtgtccagcaactacatgacctgggtcagacaggcgccgggaaagggacttgaatgggtgtccgtgatctactccggtggagcaacatactacggagactccgtgaaaggccgctttaccgtgtcccgcgataactcgaagaacaccgtgtacttgcagatgaacaggctgactgccgaggacaccgccgtgtattattgcgcccgggacaggctgtactgtggaaacaactgctacctgtactactactacgggatggacgtgtggggacagggcactctcgtcactgtgtcatccggggggggcggtagcggtggcggagggtccggcggaggaggctcagggggaggcggaagcgatatccaggtcacccagtctccctcctcgctgtccgcctccgtgggcgaccgcgtcaccattacttgccgggcgtcgcagtcgatcagctcctacctgaactggtaccagcagaagcctggaaaggccccgaagctgctgatctacgcggcctcgtccctgcaaagcggcgtcccgtcgcggttcagcggttccggttcgggaaccgacttcaccctgactatttcctccctgcaacccgaggatttcgccacttactactgccagcagtcctactccaccccacctctgaccttcggccaaggaaccaaggtcgaaatcaagaccactaccccagcaccgaggccacccaccccggctcctaccatcgcctcccagcctctgtccctgcgtccggaggcatgtagacccgcagctggtggggccgtgcatacccggggtcttgacttcgcctgcgatatctacatttgggcccctctggctggtacttgcggggtcctgctgctttcactcgtgatcactctttactgtaagcgcggtcggaagaagctgctgtacatctttaagcaacccttcatgaggcctgtgcagactactcaagaggaggacggctgttcatgccggttcccagaggaggaggaaggcggctgcgaactgcgcgtgaaattcagccgcagcgcagatgctccagcctacaagcaggggcagaaccagctctacaacgaactcaatcttggtcggagagaggagtacgacgtgctggacaagcggagaggacgggacccagaaatgggcgggaagccgcgcagaaagaatccccaagagggcctgtacaacgagctccaaaaggataagatggcagaagcctatagcgagattggtatgaaaggggaacgcagaagaggcaaaggccacgacggactgtaccagggactcagcaccgccaccaaggacacctatgacgctcttcacatgcaggccctgccgcctcgg

SEQ ID NO: 2337 - protein, 247 aa, Artificial Sequence
  source: /note="Description of Artificial Sequence: Synthetic polypeptide"
QVQLVQSGAEVKKSGASVKVSCKASGYPFTGYYIQWVRQAPGQGLEWMGWIDPNSGNTGYAQKFQGRVTMTRNTSISTAYMELSSLRSEDTAVYYCASDSYGYYYGMDVWGQGTLVTVSSGGGGSGGGGSGGGGSGGGGSDIQMTQSPSSLSASVGDRVTFTCRASQGISSALAWYQQKPGKPPKLLIYDASSLESGVPSRFSGSGSGTDFTLTISSLQPEDFATYYCQQFNNYPLTFGGGTKVEIK

SEQ ID NO: 2338 - DNA, 741 bp, Artificial Sequence
  source: /note="Description of Artificial Sequence: Synthetic polynucleotide"
caagtgcaactcgtccagtccggtgcagaagtgaaaaagagcggagcctcagtgaaagtgtcctgcaaggcctccggttaccccttcactggatactacattcagtgggtccgccaagccccgggacagggtctggagtggatggggtggattgaccctaactcgggaaatacgggatacgcgcagaagttccagggccgcgtgaccatgaccaggaacacctcgatcagcaccgcctacatggaactgtcctccctgcggtcggaggatactgccgtgtactactgcgcctccgattcctatgggtactactacggaatggacgtctggggacagggcaccctcgtgaccgtgtcctcgggaggcggagggagcggcgggggtggatcgggaggaggcggctccggcggcggcggtagcgacatccagatgacccagtcaccatcaagccttagcgcctccgtgggcgacagagtgacattcacttgtcgggcgtcccagggaatctcctccgctctggcttggtatcagcagaagcctgggaagcctccgaagctgttgatctacgacgcgagcagcctggaatcaggggtgccctcccggttttccgggtccggttctggcaccgatttcaccctgaccatttcgtccctccaacccgaggacttcgccacttactactgccagcagttcaacaactacccgctgaccttcggaggaggcactaaggtcgagatcaag

SEQ ID NO: 2339 - protein, 120 aa, Artificial Sequence
  source: /note="Description of Artificial Sequence: Synthetic polypeptide"
QVQLVQSGAEVKKSGASVKVSCKASGYPFTGYYIQWVRQAPGQGLEWMGWIDPNSGNTGYAQKFQGRVTMTRNTSISTAYMELSSLRSEDTAVYYCASDSYGYYYGMDVWGQGTLVTVSS

SEQ ID NO: 2340 - protein, 107 aa, Artificial Sequence
  source: /note="Description of Artificial Sequence: Synthetic polypeptide"
DIQMTQSPSSLSASVGDRVTFTCRASQGISSALAWYQQKPGKPPKLLIYDASSLESGVPSRFSGSGSGTDFTLTISSLQPEDFATYYCQQFNNYPLTFGGGTKVEIK

SEQ ID NO: 2341 - protein, 491 aa, Artificial Sequence
  source: /note="Description of Artificial Sequence: Synthetic polypeptide"
MALPVTALLLPLALLLHAARPQVQLVQSGAEVKKSGASVKVSCKASGYPFTGYYIQWVRQAPGQGLEWMGWIDPNSGNTGYAQKFQGRVTMTRNTSISTAYMELSSLRSEDTAVYYCASDSYGYYYGMDVWGQGTLVTVSSGGGGSGGGGSGGGGSGGGGSDIQMTQSPSSLSASVGDRVTFTCRASQGISSALAWYQQKPGKPPKLLIYDASSLESGVPSRFSGSGSGTDFTLTISSLQPEDFATYYCQQFNNYPLTFGGGTKVEIKTTTPAPRPPTPAPTIASQPLSLRPEACRPAAGGAVHTRGLDFACDIYIWAPLAGTCGVLLLSLVITLYCKRGRKKLLYIFKQPFMRPVQTTQEEDGCSCRFPEEEEGGCELRVKFSRSADAPAYKQGQNQLYNELNLGRREEYDVLDKRRGRDPEMGGKPRRKNPQEGLYNELQKDKMAEAYSEIGMKGERRRGKGHDGLYQGLSTATKDTYDALHMQALPPR

SEQ ID NO: 2342 - DNA, 1473 bp, Artificial Sequence
  source: /note="Description of Artificial Sequence: Synthetic polynucleotide"
atggccctccctgtcaccgccctgctgcttccgctggctcttctgctccacgccgctcggccccaagtgcaactcgtccagtccggtgcagaagtgaaaaagagcggagcctcagtgaaagtgtcctgcaaggcctccggttaccccttcactggatactacattcagtgggtccgccaagccccgggacagggtctggagtggatggggtggattgaccctaactcgggaaatacgggatacgcgcagaagttccagggccgcgtgaccatgaccaggaacacctcgatcagcaccgcctacatggaactgtcctccctgcggtcggaggatactgccgtgtactactgcgcctccgattcctatgggtactactacggaatggacgtctggggacagggcaccctcgtgaccgtgtcctcgggaggcggagggagcggcgggggtggatcgggaggaggcggctccggcggcggcggtagcgacatccagatgacccagtcaccatcaagccttagcgcctccgtgggcgacagagtgacattcacttgtcgggcgtcccagggaatctcctccgctctggcttggtatcagcagaagcctgggaagcctccgaagctgttgatctacgacgcgagcagcctggaatcaggggtgccctcccggttttccgggtccggttctggcaccgatttcaccctgaccatttcgtccctccaacccgaggacttcgccacttactactgccagcagttcaacaactacccgctgaccttcggaggaggcactaaggtcgagatcaagaccactaccccagcaccgaggccacccaccccggctcctaccatcgcctcccagcctctgtccctgcgtccggaggcatgtagacccgcagctggtggggccgtgcatacccggggtcttgacttcgcctgcgatatctacatttgggcccctctggctggtacttgcggggtcctgctgctttcactcgtgatcactctttactgtaagcgcggtcggaagaagctgctgtacatctttaagcaacccttcatgaggcctgtgcagactactcaagaggaggacggctgttcatgccggttcccagaggaggaggaaggcggctgcgaactgcgcgtgaaattcagccgcagcgcagatgctccagcctacaagcaggggcagaaccagctctacaacgaactcaatcttggtcggagagaggagtacgacgtgctggacaagcggagaggacgggacccagaaatgggcgggaagccgcgcagaaagaatccccaagagggcctgtacaacgagctccaaaaggataagatggcagaagcctatagcgagattggtatgaaaggggaacgcagaagaggcaaaggccacgacggactgtaccagggactcagcaccgccaccaaggacacctatgacgctcttcacatgcaggccctgccgcctcgg

SEQ ID NO: 2343 - protein, 122 aa, Artificial Sequence
  source: /note="Description of Artificial Sequence: Synthetic polypeptide"
EVQLVESGGGLVQPGGSLRLSCAASGFTFSSYEMNWVRQAPGKGLEWVSYISSSGSTIYYADSVKGRFTISRDNAKNSLYLQMNSLRAEDTAVYYCARDPYSSSWHDAFDIWGQGTMVTVSS

SEQ ID NO: 2344 - protein, 108 aa, Artificial Sequence
  source: /note="Description of Artificial Sequence: Synthetic polypeptide"
EIVLTQSPGTLSLSPGERATLSCRASQSVSSSYLAWYQQKPGQAPRLLIYGASSRATGIPDRFSGSGSGTDFTLTISRLEPEDFAVYYCQQYGSSPLTFGGGTKVDIK

SEQ ID NO: 2345 - protein, 489 aa, Artificial Sequence
  source: /note="Description of Artificial Sequence: Synthetic polypeptide"
MALPVTALLLPLALLLHAARPEVQLVESGGGLVQPGGSLRLSCAASGFTFSSYEMNWVRQAPGKGLEWVSYISSSGSTIYYADSVKGRFTISRDNAKNSLYLQMNSLRAEDTAVYYCARDPYSSSWHDAFDIWGQGTMVTVSSGGGGSGGGGSGGGGSEIVLTQSPGTLSLSPGERATLSCRASQSVSSSYLAWYQQKPGQAPRLLIYGASSRATGIPDRFSGSGSGTDFTLTISRLEPEDFAVYYCQQYGSSPLTFGGGTKVDIKTTTPAPRPPTPAPTIASQPLSLRPEACRPAAGGAVHTRGLDFACDIYIWAPLAGTCGVLLLSLVITLYCKRGRKKLLYIFKQPFMRPVQTTQEEDGCSCRFPEEEEGGCELRVKFSRSADAPAYKQGQNQLYNELNLGRREEYDVLDKRRGRDPEMGGKPRRKNPQEGLYNELQKDKMAEAYSEIGMKGERRRGKGHDGLYQGLSTATKDTYDALHMQALPPR

SEQ ID NO: 2346 - DNA, 1467 bp, Artificial Sequence
  source: /note="Description of Artificial Sequence: Synthetic polynucleotide"
atggccctccctgtcaccgccctgctgcttccgctggctcttctgctccacgccgctcggcccgaagtgcaactcgtggaaagcggtggaggtcttgtgcaacctggaggttccttgcgcctgtcatgtgcagcttccggcttcactttctcctcgtacgagatgaattgggtgcggcaggcgcctggaaaggggctggaatgggtgtcctacatctcaagctccggctcgaccatctactacgcggacagcgtgaaggggcggttcacgatttcgagggacaacgccaagaactcgctctatctgcaaatgaactccctgagagccgaggacaccgctgtgtattactgcgcccgggacccctactcctcctcatggcacgacgcctttgatatctggggccagggaaccatggtcaccgtcagcagcgggggcggaggttccgggggagggggctccggcggaggaggctccgagattgtgttgactcagagcccgggtaccctgtcgctgagccccggagagcgggccaccctttcatgccgcgccagccagtccgtgtcctcatcctacctcgcgtggtaccagcagaaacctggccaggccccgcggctgctgatctacggcgcctcctcgcgcgcaaccggaatccccgaccggttctccgggtctggcagcggaaccgacttcactctcaccatttcgaggctggagccggaagatttcgccgtgtactactgccagcagtacggctcctcgccactgactttcggcggaggaaccaaggtcgatatcaagaccactaccccagcaccgaggccacccaccccggctcctaccatcgcctcccagcctctgtccctgcgtccggaggcatgtagacccgcagctggtggggccgtgcatacccggggtcttgacttcgcctgcgatatctacatttgggcccctctggctggtacttgcggggtcctgctgctttcactcgtgatcactctttactgtaagcgcggtcggaagaagctgctgtacatctttaagcaacccttcatgaggcctgtgcagactactcaagaggaggacggctgttcatgccggttcccagaggaggaggaaggcggctgcgaactgcgcgtgaaattcagccgcagcgcagatgctccagcctacaagcaggggcagaaccagctctacaacgaactcaatcttggtcggagagaggagtacgacgtgctggacaagcggagaggacgggacccagaaatgggcgggaagccgcgcagaaagaatccccaagagggcctgtacaacgagctccaaaaggataagatggcagaagcctatagcgagattggtatgaaaggggaacgcagaagaggcaaaggccacgacggactgtaccagggactcagcaccgccaccaaggacacctatgacgctcttcacatgcaggccctgccgcctcgg

SEQ ID NO: 2347 - protein, 10 aa, Artificial Sequence
  source: /note="Description of Artificial Sequence: Synthetic peptide"
GGTFSSYAIS

SEQ ID NO: 2348 - protein, 10 aa, Artificial Sequence
  source: /note="Description of Artificial Sequence: Synthetic peptide"
GFTFDDYAMH

SEQ ID NO: 2349 - protein, 12 aa, Artificial Sequence
  source: /note="Description of Artificial Sequence: Synthetic peptide"
GGSISSSSYYWG

SEQ ID NO: 2350 - protein, 10 aa, Artificial Sequence
  source: /note="Description of Artificial Sequence: Synthetic peptide"
GFTFSSYWMS

SEQ ID NO: 2351 - protein, 12 aa, Artificial Sequence
  source: /note="Description of Artificial Sequence: Synthetic peptide"
GGPVRSGSHYWN

SEQ ID NO: 2352 - protein, 10 aa, Artificial Sequence
  source: /note="Description of Artificial Sequence: Synthetic peptide"
GGSFSGYYWS

SEQ ID NO: 2353 - protein, 10 aa, Artificial Sequence
  source: /note="Description of Artificial Sequence: Synthetic peptide"
GFTFSSYSMN

SEQ ID NO: 2354 - protein, 10 aa, Artificial Sequence
  source: /note="Description of Artificial Sequence: Synthetic peptide"
GFTFSSYEMN

SEQ ID NO: 2355 - protein, 10 aa, Artificial Sequence
  source: /note="Description of Artificial Sequence: Synthetic peptide"
ANTFSDHVMH

SEQ ID NO: 2356 - protein, 10 aa, Artificial Sequence
  source: /note="Description of Artificial Sequence: Synthetic peptide"
GFTFNSYGLH

SEQ ID NO: 2357 - protein, 10 aa, Artificial Sequence
  source: /note="Description of Artificial Sequence: Synthetic peptide"
GFNVSSNYMT

SEQ ID NO: 2358 - protein, 10 aa, Artificial Sequence
  source: /note="Description of Artificial Sequence: Synthetic peptide"
GYPFTGYYIQ

SEQ ID NO: 2359 - protein, 16 aa, Artificial Sequence
  source: /note="Description of Artificial Sequence: Synthetic peptide"
GIIPIFGTANYAQKFQ

SEQ ID NO: 2360 - protein, 17 aa, Artificial Sequence
  source: /note="Description of Artificial Sequence: Synthetic peptide"
LISGDGGSTYYADSVKG

SEQ ID NO: 2361 - protein, 16 aa, Artificial Sequence
  source: /note="Description of Artificial Sequence: Synthetic peptide"
SIYYSGSTYYNPSLKS

SEQ ID NO: 2362 - protein, 17 aa, Artificial Sequence
  source: /note="Description of Artificial Sequence: Synthetic peptide"
NINEDGSAKFYVDSVKG

SEQ ID NO: 2363 - protein, 16 aa, Artificial Sequence
  source: /note="Description of Artificial Sequence: Synthetic peptide"
YIYYSGSTNYNPSLEN

SEQ ID NO: 2364 - protein, 16 aa, Artificial Sequence
  source: /note="Description of Artificial Sequence: Synthetic peptide"
EINHSGSTNYNPSLKS

SEQ ID NO: 2365 - protein, 17 aa, Artificial Sequence
  source: /note="Description of Artificial Sequence: Synthetic peptide"
YIHAANGGTHYSQKFQD

SEQ ID NO: 2366 - protein, 17 aa, Artificial Sequence
  source: /note="Description of Artificial Sequence: Synthetic peptide"
YISSSSSTIYYADSVKG

SEQ ID NO: 2367 - protein, 17 aa, Artificial Sequence
  source: /note="Description of Artificial Sequence: Synthetic peptide"
LIEYDGSNKYYGDSVKG

SEQ ID NO: 2368 - protein, 16 aa, Artificial Sequence
  source: /note="Description of Artificial Sequence: Synthetic peptide"
VIYSGGATYYGDSVKG

SEQ ID NO: 2369 - protein, 17 aa, Artificial Sequence
  source: /note="Description of Artificial Sequence: Synthetic peptide"
WIDPNSGNTGYAQKFQG

SEQ ID NO: 2370 - protein, 11 aa, Artificial Sequence
  source: /note="Description of Artificial Sequence: Synthetic peptide"
DLEMATIMGGY

SEQ ID NO: 2371 - protein, 9 aa, Artificial Sequence
  source: /note="Description of Artificial Sequence: Synthetic peptide"
VFDSYYMDV

SEQ ID NO: 2372 - protein, 15 aa, Artificial Sequence
  source: /note="Description of Artificial Sequence: Synthetic peptide"
PGTYYDFLSGYYPFY

SEQ ID NO: 2373 - protein, 7 aa, Artificial Sequence
  source: /note="Description of Artificial Sequence: Synthetic peptide"
DLRSGRY

SEQ ID NO: 2374 - protein, 13 aa, Artificial Sequence
  source: /note="Description of Artificial Sequence: Synthetic peptide"
GTATFDWNFPFDS

SEQ ID NO: 2375 - protein, 18 aa, Artificial Sequence
  source: /note="Description of Artificial Sequence: Synthetic peptide"
GSGLVVYAIRVGSGWFDY

SEQ ID NO: 2376 - protein, 20 aa, Artificial Sequence
  source: /note="Description of Artificial Sequence: Synthetic peptide"
DPSSSGSYYMEDSYYYGMDV

SEQ ID NO: 2377 - protein, 8 aa, Artificial Sequence
  source: /note="Description of Artificial Sequence: Synthetic peptide"
EALGSSWE

SEQ ID NO: 2378 - protein, 10 aa, Artificial Sequence
  source: /note="Description of Artificial Sequence: Synthetic peptide"
GGYNSDAFDI

SEQ ID NO: 2379 - protein, 12 aa, Artificial Sequence
  source: /note="Description of Artificial Sequence: Synthetic peptide"
DLSVRAIDAFDI

SEQ ID NO: 2380 - protein, 10 aa, Artificial Sequence
  source: /note="Description of Artificial Sequence: Synthetic peptide"
EGNEDLAFDI

SEQ ID NO: 2381 - protein, 19 aa, Artificial Sequence
  source: /note="Description of Artificial Sequence: Synthetic peptide"
DRLYCGNNCYLYYYYGMDV

SEQ ID NO: 2382 - protein, 11 aa, Artificial Sequence
  source: /note="Description of Artificial Sequence: Synthetic peptide"
DSYGYYYGMDV

SEQ ID NO: 2383 - protein, 13 aa, Artificial Sequence
  source: /note="Description of Artificial Sequence: Synthetic peptide"
DPYSSSWHDAFDI

SEQ ID NO: 2384 - protein, 16 aa, Artificial Sequence
  source: /note="Description of Artificial Sequence: Synthetic peptide"
RSSQSLVYTDGNTYLN

SEQ ID NO: 2385 - protein, 11 aa, Artificial Sequence
  source: /note="Description of Artificial Sequence: Synthetic peptide"
RASQGISSYLA

SEQ ID NO: 2386 - protein, 12 aa, Artificial Sequence
  source: /note="Description of Artificial Sequence: Synthetic peptide"
RASQSISGSFLA

SEQ ID NO: 2387 - protein, 13 aa, Artificial Sequence
  source: /note="Description of Artificial Sequence: Synthetic peptide"
TGSSGSIASNYVQ

SEQ ID NO: 2388 - protein, 11 aa, Artificial Sequence
  source: /note="Description of Artificial Sequence: Synthetic peptide"
QASQDISNYLN

SEQ ID NO: 2389 - protein, 11 aa, Artificial Sequence
  source: /note="Description of Artificial Sequence: Synthetic peptide"
QASQFIKKNLN

SEQ ID NO: 2390 - protein, 11 aa, Artificial Sequence
  source: /note="Description of Artificial Sequence: Synthetic peptide"
RASQGISSALA

SEQ ID NO: 2391 - protein, 7 aa, Artificial Sequence
  source: /note="Description of Artificial Sequence: Synthetic peptide"
KVSNRDS

SEQ ID NO: 2392 - protein, 7 aa, Artificial Sequence
  source: /note="Description of Artificial Sequence: Synthetic peptide"
AASTLQS

SEQ ID NO: 2393 - protein, 7 aa, Artificial Sequence
  source: /note="Description of Artificial Sequence: Synthetic peptide"
EDNQRPS

SEQ ID NO: 2394 - protein, 7 aa, Artificial Sequence
  source: /note="Description of Artificial Sequence: Synthetic peptide"
DASNLET

SEQ ID NO: 2395 - protein, 7 aa, Artificial Sequence
  source: /note="Description of Artificial Sequence: Synthetic peptide"
DASSLQT

SEQ ID NO: 2396 - protein, 7 aa, Artificial Sequence
  source: /note="Description of Artificial Sequence: Synthetic peptide"
DASSLES

SEQ ID NO: 2397 - protein, 12 aa, Artificial Sequence
  source: /note="Description of Artificial Sequence: Synthetic peptide"
SSYTSSSTLDVV

SEQ ID NO: 2398 - protein, 9 aa, Artificial Sequence
  source: /note="Description of Artificial Sequence: Synthetic peptide"
MQGTHWSFT

SEQ ID NO: 2399 - protein, 9 aa, Artificial Sequence
  source: /note="Description of Artificial Sequence: Synthetic peptide"
QQLNSYPYT

SEQ ID NO: 2400 - protein, 9 aa, Artificial Sequence
  source: /note="Description of Artificial Sequence: Synthetic peptide"
QQYGSSPPT

SEQ ID NO: 2401 - protein, 9 aa, Artificial Sequence
  source: /note="Description of Artificial Sequence: Synthetic peptide"
QQSYSTPWT

SEQ ID NO: 2402 - protein, 10 aa, Artificial Sequence
  source: /note="Description of Artificial Sequence: Synthetic peptide"
QQSYSTPPWT

SEQ ID NO: 2403 - protein, 10 aa, Artificial Sequence
  source: /note="Description of Artificial Sequence: Synthetic peptide"
QSYDSSNQVV

SEQ ID NO: 2404 - protein, 9 aa, Artificial Sequence
  source: /note="Description of Artificial Sequence: Synthetic peptide"
QQYDNLPLT

SEQ ID NO: 2405 - protein, 9 aa, Artificial Sequence
  source: /note="Description of Artificial Sequence: Synthetic peptide"
QQSYSTPLT

SEQ ID NO: 2406 - protein, 9 aa, Artificial Sequence
  source: /note="Description of Artificial Sequence: Synthetic peptide"
QQAYSTPFT

SEQ ID NO: 2407 - protein, 9 aa, Artificial Sequence
  source: /note="Description of Artificial Sequence: Synthetic peptide"
QQHDNLPLT

SEQ ID NO: 2408 - protein, 10 aa, Artificial Sequence
  source: /note="Description of Artificial Sequence: Synthetic peptide"
QQSYSTPPLT

SEQ ID NO: 2409 - protein, 9 aa, Artificial Sequence
  source: /note="Description of Artificial Sequence: Synthetic peptide"
QQFNNYPLT

SEQ ID NO: 2410 - protein, 9 aa, Artificial Sequence
  source: /note="Description of Artificial Sequence: Synthetic peptide"
QQYGSSPLT

SEQ ID NO: 2411 - protein, 10 aa, Artificial Sequence
  source: /note="Description of Artificial Sequence: Synthetic peptide"
GYTFTGYYMH

SEQ ID NO: 2412 - protein, 10 aa, Artificial Sequence
  source: /note="Description of Artificial Sequence: Synthetic peptide"
GYIFTGYYIH

SEQ ID NO: 2413 - protein, 10 aa, Artificial Sequence
  source: /note="Description of Artificial Sequence: Synthetic peptide"
GYTFTDYYMH

SEQ ID NO: 2414 - protein, 17 aa, Artificial Sequence
  source: /note="Description of Artificial Sequence: Synthetic peptide"
WINPNSGGTNYAQKFQG

SEQ ID NO: 2415 - protein, 17 aa, Artificial Sequence
  source: /note="Description of Artificial Sequence: Synthetic peptide"
WINPNSGDTNYAQKFQG

SEQ ID NO: 2416 - protein, 12 aa, Artificial Sequence
  source: /note="Description of Artificial Sequence: Synthetic peptide"
DMNILATVPFDI

SEQ ID NO: 2417 - protein, 11 aa, Artificial Sequence
  source: /note="Description of Artificial Sequence: Synthetic peptide"
RASQSISTYLN

SEQ ID NO: 2418 - protein, 7 aa, Artificial Sequence
  source: /note="Description of Artificial Sequence: Synthetic peptide"
AAFSLQS

SEQ ID NO: 2419 - protein, 9 aa, Artificial Sequence
  source: /note="Description of Artificial Sequence: Synthetic peptide"
QQGDSVPLT

SEQ ID NO: 2420 - protein, 10 aa, Artificial Sequence
  source: /note="Description of Artificial Sequence: Synthetic peptide"
GYTFTSYWMN

SEQ ID NO: 2421 - protein, 17 aa, Artificial Sequence
  source: /note="Description of Artificial Sequence: Synthetic peptide"
RIDPYDSETHYNQKFKD

SEQ ID NO: 2422 - protein, 6 aa, Artificial Sequence
  source: /note="Description of Artificial Sequence: Synthetic peptide"
GNWDDY

SEQ ID NO: 2423 - protein, 11 aa, Artificial Sequence
  source: /note="Description of Artificial Sequence: Synthetic peptide"
RASKSISKDLA

SEQ ID NO: 2424 - protein, 7 aa, Artificial Sequence
  source: /note="Description of Artificial Sequence: Synthetic peptide"
SGSTLQS

SEQ ID NO: 2425 - protein, 9 aa, Artificial Sequence
  source: /note="Description of Artificial Sequence: Synthetic peptide"
QQHNKYPYT

SEQ ID NO: 2426 - DNA, 1461 bp, Artificial Sequence
  source: /note="Description of Artificial Sequence: Synthetic polynucleotide"
atggccctccctgtcaccgccctgctgcttccgctggctcttctgctccacgccgctcggccccaagtgcaactcgtccaaagcggagcggaagtcaagaaacccggagcgagcgtgaaagtgtcctgcaaagcctccggctacacctttacgggctactacatgcactgggtgcgccaggcaccaggacagggtcttgaatggatgggatggatcaaccctaattcgggcggaactaactacgcacagaagttccaggggagagtgactctgactcgggatacctccatctcaactgtctacatggaactctcccgcttgcggtcagatgatacggcagtgtactactgcgcccgcgacatgaatatcctggctaccgtgccgttcgacatctggggacaggggactatggttactgtctcatcgggcggtggaggttcaggaggaggcggctcgggaggcggaggttcggacattcagatgacccagtccccatcctctctgtcggccagcgtcggagatagggtgaccattacctgtcgggcctcgcaaagcatctcctcgtacctcaactggtatcagcaaaagccgggaaaggcgcctaagctgctgatctacgccgcttcgagcttgcaaagcggggtgccatccagattctcgggatcaggctcaggaaccgacttcaccctgaccgtgaacagcctccagccggaggactttgccacttactactgccagcagggagactccgtgccgcttactttcggggggggtacccgcctggagatcaagaccactaccccagcaccgaggccacccaccccggctcctaccatcgcctcccagcctctgtccctgcgtccggaggcatgtagacccgcagctggtggggccgtgcatacccggggtcttgacttcgcctgcgatatctacatttgggcccctctggctggtacttgcggggtcctgctgctttcactcgtgatcactctttactgtaagcgcggtcggaagaagctgctgtacatctttaagcaacccttcatgaggcctgtgcagactactcaagaggaggacggctgttcatgccggttcccagaggaggaggaaggcggctgcgaactgcgcgtgaaattcagccgcagcgcagatgctccagcctacaagcaggggcagaaccagctctacaacgaactcaatcttggtcggagagaggagtacgacgtgctggacaagcggagaggacgggacccagaaatgggcgggaagccgcgcagaaagaatccccaagagggcctgtacaacgagctccaaaaggataagatggcagaagcctatagcgagattggtatgaaaggggaacgcagaagaggcaaaggccacgacggactgtaccagggactcagcaccgccaccaaggacacctatgacgctcttcacatgcaggccctgccgcctcgg

SEQ ID NO: 2427 - protein, 487 aa, Artificial Sequence
  source: /note="Description of Artificial Sequence: Synthetic polypeptide"
MALPVTALLLPLALLLHAARPQVQLVQSGAEVKKPGASVKVSCKASGYTFTGYYMHWVRQAPGQGLEWMGWINPNSGGTNYAQKFQGRVTLTRDTSISTVYMELSRLRSDDTAVYYCARDMNILATVPFDIWGQGTMVTVSSGGGGSGGGGSGGGGSDIQMTQSPSSLSASVGDRVTITCRASQSISSYLNWYQQKPGKAPKLLIYAASSLQSGVPSRFSGSGSGTDFTLTVNSLQPEDFATYYCQQGDSVPLTFGGGTRLEIKTTTPAPRPPTPAPTIASQPLSLRPEACRPAAGGAVHTRGLDFACDIYIWAPLAGTCGVLLLSLVITLYCKRGRKKLLYIFKQPFMRPVQTTQEEDGCSCRFPEEEEGGCELRVKFSRSADAPAYKQGQNQLYNELNLGRREEYDVLDKRRGRDPEMGGKPRRKNPQEGLYNELQKDKMAEAYSEIGMKGERRRGKGHDGLYQGLSTATKDTYDALHMQALPPR

SEQ ID NO: 2428 - protein, 264 aa, Artificial Sequence
  source: /note="Description of Artificial Sequence: Synthetic polypeptide"
MALPVTALLLPLALLLHAARPQVQLVQSGAEVKKPGASVKVSCKASGYTFTGYYMHWVRQAPGQGLEWMGWINPNSGGTNYAQKFQGRVTLTRDTSISTVYMELSRLRSDDTAVYYCARDMNILATVPFDIWGQGTMVTVSSGGGGSGGGGSGGGGSDIQMTQSPSSLSASVGDRVTITCRASQSISSYLNWYQQKPGKAPKLLIYAASSLQSGVPSRFSGSGSGTDFTLTVNSLQPEDFATYYCQQGDSVPLTFGGGTRLEIK

SEQ ID NO: 2429 - protein, 121 aa, Artificial Sequence
  source: /note="Description of Artificial Sequence: Synthetic polypeptide"
QVQLVQSGAEVKKPGASVKVSCKASGYTFTGYYMHWVRQAPGQGLEWMGWINPNSGGTNYAQKFQGRVTLTRDTSISTVYMELSRLRSDDTAVYYCARDMNILATVPFDIWGQGTMVTVSS

SEQ ID NO: 2430 - protein, 107 aa, Artificial Sequence
  source: /note="Description of Artificial Sequence: Synthetic polypeptide"
DIQMTQSPSSLSASVGDRVTITCRASQSISSYLNWYQQKPGKAPKLLIYAASSLQSGVPSRFSGSGSGTDFTLTVNSLQPEDFATYYCQQGDSVPLTFGGGTRLEIK

SEQ ID NO: 2431 - DNA, 1461 bp, Artificial Sequence
  source: /note="Description of Artificial Sequence: Synthetic polynucleotide"
atggccctccctgtcaccgccctgctgcttccgctggctcttctgctccacgccgctcggccccaagtccaactcgttcaatccggcgcagaagtcaagaagccaggagcatcagtgaaagtgtcctgcaaagcctcaggctacatcttcacgggatactacatccactgggtgcgccaggctccgggccagggccttgagtggatgggctggatcaaccctaactctgggggaaccaactacgctcagaagttccaggggagggtcactatgactcgcgatacctccatctccactgcgtacatggaactctcgggactgagatccgacgatcctgccgtgtactactgcgcccgggacatgaacatcttggcgaccgtgccgtttgacatttggggacagggcaccctcgtcactgtgtcgagcggtggaggaggctcggggggtggcggatcaggagggggaggaagcgacatccagctgactcagagcccatcgtcgttgtccgcgtcggtgggggatagagtgaccattacttgccgcgccagccagagcatctcatcatatctgaattggtaccagcagaagcccggaaaggccccaaaactgctgatctacgctgcaagcagcctccaatcgggagtgccgtcacggttctccgggtccggttcgggaactgactttaccctgaccgtgaattcgctgcaaccggaggatttcgccacgtactactgtcagcaaggagactccgtgccgctgaccttcggtggaggcaccaaggtcgaaatcaagaccactaccccagcaccgaggccacccaccccggctcctaccatcgcctcccagcctctgtccctgcgtccggaggcatgtagacccgcagctggtggggccgtgcatacccggggtcttgacttcgcctgcgatatctacatttgggcccctctggctggtacttgcggggtcctgctgctttcactcgtgatcactctttactgtaagcgcggtcggaagaagctgctgtacatctttaagcaacccttcatgaggcctgtgcagactactcaagaggaggacggctgttcatgccggttcccagaggaggaggaaggcggctgcgaactgcgcgtgaaattcagccgcagcgcagatgctccagcctacaagcaggggcagaaccagctctacaacgaactcaatcttggtcggagagaggagtacgacgtgctggacaagcggagaggacgggacccagaaatgggcgggaagccgcgcagaaagaatccccaagagggcctgtacaacgagctccaaaaggataagatggcagaagcctatagcgagattggtatgaaaggggaacgcagaagaggcaaaggccacgacggactgtaccagggactcagcaccgccaccaaggacacctatgacgctcttcacatgcaggccctgccgcctcgg

SEQ ID NO: 2432 - protein, 487 aa, Artificial Sequence
  source: /note="Description of Artificial Sequence: Synthetic polypeptide"
MALPVTALLLPLALLLHAARPQVQLVQSGAEVKKPGASVKVSCKASGYIFTGYYIHWVRQAPGQGLEWMGWINPNSGGTNYAQKFQGRVTMTRDTSISTAYMELSGLRSDDPAVYYCARDMNILATVPFDIWGQGTLVTVSSGGGGSGGGGSGGGGSDIQLTQSPSSLSASVGDRVTITCRASQSISSYLNWYQQKPGKAPKLLIYAASSLQSGVPSRFSGSGSGTDFTLTVNSLQPEDFATYYCQQGDSVPLTFGGGTKVEIKTTTPAPRPPTPAPTIASQPLSLRPEACRPAAGGAVHTRGLDFACDIYIWAPLAGTCGVLLLSLVITLYCKRGRKKLLYIFKQPFMRPVQTTQEEDGCSCRFPEEEEGGCELRVKFSRSADAPAYKQGQNQLYNELNLGRREEYDVLDKRRGRDPEMGGKPRRKNPQEGLYNELQKDKMAEAYSEIGMKGERRRGKGHDGLYQGLSTATKDTYDALHMQALPPR

SEQ ID NO: 2433 - protein, 264 aa, Artificial Sequence
  source: /note="Description of Artificial Sequence: Synthetic polypeptide"
MALPVTALLLPLALLLHAARPQVQLVQSGAEVKKPGASVKVSCKASGYIFTGYYIHWVRQAPGQGLEWMGWINPNSGGTNYAQKFQGRVTMTRDTSISTAYMELSGLRSDDPAVYYCARDMNILATVPFDIWGQGTLVTVSSGGGGSGGGGSGGGGSDIQLTQSPSSLSASVGDRVTITCRASQSISSYLNWYQQKPGKAPKLLIYAASSLQSGVPSRFSGSGSGTDFTLTVNSLQPEDFATYYCQQGDSVPLTFGGGTKVEIK

SEQ ID NO: 2434 - protein, 121 aa, Artificial Sequence
  source: /note="Description of Artificial Sequence: Synthetic polypeptide"
QVQLVQSGAEVKKPGASVKVSCKASGYIFTGYYIHWVRQAPGQGLEWMGWINPNSGGTNYAQKFQGRVTMTRDTSISTAYMELSGLRSDDPAVYYCARDMNILATVPFDIWGQGTLVTVSS

SEQ ID NO: 2435 - protein, 107 aa, Artificial Sequence
  source: /note="Description of Artificial Sequence: Synthetic polypeptide"
DIQLTQSPSSLSASVGDRVTITCRASQSISSYLNWYQQKPGKAPKLLIYAASSLQSGVPSRFSGSGSGTDFTLTVNSLQPEDFATYYCQQGDSVPLTFGGGTKVEIK

SEQ ID NO: 2436 - DNA, 1467 bp, Artificial Sequence
  source: /note="Description of Artificial Sequence: Synthetic polynucleotide"
atggccctccctgtcaccgccctgctgcttccgctggctcttctgctccacgccgctcggccccaagtccaactccaacagtcaggcgcagaagtgaaaaagagcggtgcatcggtgaaagtgtcatgcaaagcctcgggctacaccttcactgactactatatgcactggctgcggcaggcaccgggacagggacttgagtggatgggatggatcaacccgaattcaggggacactaactacgcgcagaagttccaggggagagtgaccctgacgagggacacctcaatttcgaccgtctacatggaattgtcgcgcctgagatcggacgatactgctgtgtactactgtgcccgcgacatgaacatcctcgcgactgtgccttttgatatctggggacaggggactatggtcaccgtttcctccgcttccggtggcggaggctcgggaggccgggcctccggtggaggaggcagcgacatccagatgactcagagcccttcctcgctgagcgcctcagtgggagatcgcgtgaccatcacttgccgggccagccagtccatttcgtcctacctcaattggtaccagcagaagccgggaaaggcgcccaagctcttgatctacgctgcgagctccctgcaaagcggggtgccgagccgattctcgggttccggctcgggaaccgacttcactctgaccatctcatccctgcaaccagaggactttgccacctactactgccaacaaggagattctgtcccactgacgttcggcggaggaaccaaggtcgaaatcaagaccactaccccagcaccgaggccacccaccccggctcctaccatcgcctcccagcctctgtccctgcgtccggaggcatgtagacccgcagctggtggggccgtgcatacccggggtcttgacttcgcctgcgatatctacatttgggcccctctggctggtacttgcggggtcctgctgctttcactcgtgatcactctttactgtaagcgcggtcggaagaagctgctgtacatctttaagcaacccttcatgaggcctgtgcagactactcaagaggaggacggctgttcatgccggttcccagaggaggaggaaggcggctgcgaactgcgcgtgaaattcagccgcagcgcagatgctccagcctacaagcaggggcagaaccagctctacaacgaactcaatcttggtcggagagaggagtacgacgtgctggacaagcggagaggacgggacccagaaatgggcgggaagccgcgcagaaagaatccccaagagggcctgtacaacgagctccaaaaggataagatggcagaagcctatagcgagattggtatgaaaggggaacgcagaagaggcaaaggccacgacggactgtaccagggactcagcaccgccaccaaggacacctatgacgctcttcacatgcaggccctgccgcctcgg

SEQ ID NO: 2437 - protein, 336 aa, Artificial Sequence
  source: /note="Description of Artificial Sequence: Synthetic polypeptide"
MALPVTALLLPLALLLHAARPQVQLQQSGAEVKKSGASVKVSCKASGYTFTDYYMHWLRQAPGQGLEWMGWINPNSGDTNYAQKFQGRVTLTRDTSISTVYMELSRLRSDDTAVYYCARDMNILATVPFDIWGQGTMVTVSSASGGGGSGGRASGGGGSDIQMTQSPSSLSASVGDRVTITCRASQSISSYLNWYQQKPGKAPKLLIYAASSLQSGVPSRFSGSGSGTDFTLTISSLQPEDFATYYCQQGDSVPLTFGGGTKVEIKTTTPAPRPPTPAPTIASQPLSLRPEACRPAAGGAVHTRGLDFACDIYIWAPLAGTCGVLLLSLVITLYCK

SEQ ID NO: 2438 - protein, 266 aa, Artificial Sequence
  source: /note="Description of Artificial Sequence: Synthetic polypeptide"
MALPVTALLLPLALLLHAARPQVQLQQSGAEVKKSGASVKVSCKASGYTFTDYYMHWLRQAPGQGLEWMGWINPNSGDTNYAQKFQGRVTLTRDTSISTVYMELSRLRSDDTAVYYCARDMNILATVPFDIWGQGTMVTVSSASGGGGSGGRASGGGGSDIQMTQSPSSLSASVGDRVTITCRASQSISSYLNWYQQKPGKAPKLLIYAASSLQSGVPSRFSGSGSGTDFTLTISSLQPEDFATYYCQQGDSVPLTFGGGTKVEIK

SEQ ID NO: 2439 - protein, 121 aa, Artificial Sequence
  source: /note="Description of Artificial Sequence: Synthetic polypeptide"
QVQLQQSGAEVKKSGASVKVSCKASGYTFTDYYMHWLRQAPGQGLEWMGWINPNSGDTNYAQKFQGRVTLTRDTSISTVYMELSRLRSDDTAVYYCARDMNILATVPFDIWGQGTMVTVSS

SEQ ID NO: 2440 - protein, 107 aa, Artificial Sequence
  source: /note="Description of Artificial Sequence: Synthetic polypeptide"
DIQMTQSPSSLSASVGDRVTITCRASQSISSYLNWYQQKPGKAPKLLIYAASSLQSGVPSRFSGSGSGTDFTLTISSLQPEDFATYYCQQGDSVPLTFGGGTKVEIK

SEQ ID NO: 2441 - DNA, 1461 bp, Artificial Sequence
  source: /note="Description of Artificial Sequence: Synthetic polynucleotide"
atggccctccctgtcaccgccctgctgcttccgctggctcttctgctccacgccgctcggccccaagtccaactcgtccagtcaggagcggaagtcaagaagcccggagcgtcagtcaaagtgtcatgcaaagcctcgggctacactttcactgggtactacatgcactgggtgcgccaggctccaggacagggactggaatggatgggatggatcaacccgaactccggtggcaccaattacgcccagaagttccaggggagggtgaccatgactcgcgacacgtcgatcagcaccgcatacatggagctgtcaagactccggtccgacgatactgccgtgtactactgcgcacgggacatgaacattctggccaccgtgccttttgacatctggggtcagggaactatggttaccgtgtcctctggtggaggcggctccggcggggggggaagcggaggcggtggaagcgacattcagatgacccagtcgccttcatccctttcggcgagcgtgggagatcgcgtcactatcacttgtcgggcctcgcagtccatctccacctacctcaattggtaccagcagaagccaggaaaagcaccgaatctgctgatctacgccgcgttttccttgcaatcgggagtgccaagcagattcagcggatcgggatcaggcactgatttcaccctcaccatcaactcgctgcaaccggaggatttcgctacgtactattgccaacaaggagacagcgtgccgctcaccttcggcggagggactaagctggaaatcaagaccactaccccagcaccgaggccacccaccccggctcctaccatcgcctcccagcctctgtccctgcgtccggaggcatgtagacccgcagctggtggggccgtgcatacccggggtcttgacttcgcctgcgatatctacatttgggcccctctggctggtacttgcggggtcctgctgctttcactcgtgatcactctttactgtaagcgcggtcggaagaagctgctgtacatctttaagcaacccttcatgaggcctgtgcagactactcaagaggaggacggctgttcatgccggttcccagaggaggaggaaggcggctgcgaactgcgcgtgaaattcagccgcagcgcagatgctccagcctacaagcaggggcagaaccagctctacaacgaactcaatcttggtcggagagaggagtacgacgtgctggacaagcggagaggacgggacccagaaatgggcgggaagccgcgcagaaagaatccccaagagggcctgtacaacgagctccaaaaggataagatggcagaagcctatagcgagattggtatgaaaggggaacgcagaagaggcaaaggccacgacggactgtaccagggactcagcaccgccaccaaggacacctatgacgctcttcacatgcaggccctgccgcctcgg

SEQ ID NO: 2442 - protein, 487 aa, Artificial Sequence
  source: /note="Description of Artificial Sequence: Synthetic polypeptide"
MALPVTALLLPLALLLHAARPQVQLVQSGAEVKKPGASVKVSCKASGYTFTGYYMHWVRQAPGQGLEWMGWINPNSGGTNYAQKFQGRVTMTRDTSISTAYMELSRLRSDDTAVYYCARDMNILATVPFDIWGQGTMVTVSSGGGGSGGGGSGGGGSDIQMTQSPSSLSASVGDRVTITCRASQSISTYLNWYQQKPGKAPNLLIYAAFSLQSGVPSRFSGSGSGTDFTLTINSLQPEDFATYYCQQGDSVPLTFGGGTKLEIKTTTPAPRPPTPAPTIASQPLSLRPEACRPAAGGAVHTRGLDFACDIYIWAPLAGTCGVLLLSLVITLYCKRGRKKLLYIFKQPFMRPVQTTQEEDGCSCRFPEEEEGGCELRVKFSRSADAPAYKQGQNQLYNELNLGRREEYDVLDKRRGRDPEMGGKPRRKNPQEGLYNELQKDKMAEAYSEIGMKGERRRGKGHDGLYQGLSTATKDTYDALHMQALPPR

SEQ ID NO: 2443 - protein, 264 aa, Artificial Sequence
  source: /note="Description of Artificial Sequence: Synthetic polypeptide"
MALPVTALLLPLALLLHAARPQVQLVQSGAEVKKPGASVKVSCKASGYTFTGYYMHWVRQAPGQGLEWMGWINPNSGGTNYAQKFQGRVTMTRDTSISTAYMELSRLRSDDTAVYYCARDMNILATVPFDIWGQGTMVTVSSGGGGSGGGGSGGGGSDIQMTQSPSSLSASVGDRVTITCRASQSISTYLNWYQQKPGKAPNLLIYAAFSLQSGVPSRFSGSGSGTDFTLTINSLQPEDFATYYCQQGDSVPLTFGGGTKLEIK

SEQ ID NO: 2444 - protein, 121 aa, Artificial Sequence
  source: /note="Description of Artificial Sequence: Synthetic polypeptide"
QVQLVQSGAEVKKPGASVKVSCKASGYTFTGYYMHWVRQAPGQGLEWMGWINPNSGGTNYAQKFQGRVTMTRDTSISTAYMELSRLRSDDTAVYYCARDMNILATVPFDIWGQGTMVTVSS

SEQ ID NO: 2445 - protein, 107 aa, Artificial Sequence
  source: /note="Description of Artificial Sequence: Synthetic polypeptide"
DIQMTQSPSSLSASVGDRVTITCRASQSISTYLNWYQQKPGKAPNLLIYAAFSLQSGVPSRFSGSGSGTDFTLTINSLQPEDFATYYCQQGDSVPLTFGGGTKLEIK

SEQ ID NO: 2446 - DNA, 1458 bp, Artificial Sequence
  source: /note="Description of Artificial Sequence: Synthetic polynucleotide"
atggccctccctgtcaccgccctgctgcttccgctggctcttctgctccacgccgctcggccccaagtgcagctggtccagtcgggagccgaagtcaagaagcccggcgctagcgtgaaagtgtcctgcaaagcctccgggtacacattcacctcctactggatgaattgggtcagacaggcgcccggccagggactcgagtggatgggaaggattgatccttacgactccgaaacccattacaaccagaagttcaaggaccgcgtgaccatgactgtggataagtccacttccaccgcttacatggagctgtccagcctgcgctccgaggataccgcagtgtactactgcgcccggggaaactgggacgactattggggacagggaactaccgtgaccgtgtcaagcgggggtggcggtagcggaggagggggctccggcggcggcggctcagggggcggaggaagcgacgtgcagctcacccagtcgccctcatttctgtcggcctcagtgggagacagagtgaccattacttgtcgggcctccaagagcatctccaaggacctggcctggtatcagcagaagccaggaaaggcgcctaagttgctcatctactcggggtcgaccctgcaatctggcgtgccgtcccggttctccggttcgggaagcggtaccgaattcacccttactatctcctccctgcaaccggaggacttcgccacctactactgccaacagcacaacaagtacccgtacactttcgggggtggcacgaaggtcgaaatcaagaccactaccccagcaccgaggccacccaccccggctcctaccatcgcctcccagcctctgtccctgcgtccggaggcatgtagacccgcagctggtggggccgtgcatacccggggtcttgacttcgcctgcgatatctacatttgggcccctctggctggtacttgcggggtcctgctgctttcactcgtgatcactctttactgtaagcgcggtcggaagaagctgctgtacatctttaagcaacccttcatgaggcctgtgcagactactcaagaggaggacggctgttcatgccggttcccagaggaggaggaaggcggctgcgaactgcgcgtgaaattcagccgcagcgcagatgctccagcctacaagcaggggcagaaccagctctacaacgaactcaatcttggtcggagagaggagtacgacgtgctggacaagcggagaggacgggacccagaaatgggcgggaagccgcgcagaaagaatccccaagagggcctgtacaacgagctccaaaaggataagatggcagaagcctatagcgagattggtatgaaaggggaacgcagaagaggcaaaggccacgacggactgtaccagggactcagcaccgccaccaaggacacctatgacgctcttcacatgcaggccctgccgcctcgg

SEQ ID NO: 2447 - protein, 486 aa, Artificial Sequence
  source: /note="Description of Artificial Sequence: Synthetic polypeptide"
MALPVTALLLPLALLLHAARPQVQLVQSGAEVKKPGASVKVSCKASGYTFTSYWMNWVRQAPGQGLEWMGRIDPYDSETHYNQKFKDRVTMTVDKSTSTAYMELSSLRSEDTAVYYCARGNWDDYWGQGTTVTVSSGGGGSGGGGSGGGGSGGGGSDVQLTQSPSFLSASVGDRVTITCRASKSISKDLAWYQQKPGKAPKLLIYSGSTLQSGVPSRFSGSGSGTEFTLTISSLQPEDFATYYCQQHNKYPYTFGGGTKVEIKTTTPAPRPPTPAPTIASQPLSLRPEACRPAAGGAVHTRGLDFACDIYIWAPLAGTCGVLLLSLVITLYCKRGRKKLLYIFKQPFMRPVQTTQEEDGCSCRFPEEEEGGCELRVKFSRSADAPAYKQGQNQLYNELNLGRREEYDVLDKRRGRDPEMGGKPRRKNPQEGLYNELQKDKMAEAYSEIGMKGERRRGKGHDGLYQGLSTATKDTYDALHMQALPPR

SEQ ID NO: 2448 - protein, 263 aa, Artificial Sequence
  source: /note="Description of Artificial Sequence: Synthetic polypeptide"
MALPVTALLLPLALLLHAARPQVQLVQSGAEVKKPGASVKVSCKASGYTFTSYWMNWVRQAPGQGLEWMGRIDPYDSETHYNQKFKDRVTMTVDKSTSTAYMELSSLRSEDTAVYYCARGNWDDYWGQGTTVTVSSGGGGSGGGGSGGGGSGGGGSDVQLTQSPSFLSASVGDRVTITCRASKSISKDLAWYQQKPGKAPKLLIYSGSTLQSGVPSRFSGSGSGTEFTLTISSLQPEDFATYYCQQHNKYPYTFGGGTKVEIK

SEQ ID NO: 2449 - protein, 115 aa, Artificial Sequence
  source: /note="Description of Artificial Sequence: Synthetic polypeptide"
QVQLVQSGAEVKKPGASVKVSCKASGYTFTSYWMNWVRQAPGQGLEWMGRIDPYDSETHYNQKFKDRVTMTVDKSTSTAYMELSSLRSEDTAVYYCARGNWDDYWGQGTTVTVSS

SEQ ID NO: 2450 - protein, 107 aa, Artificial Sequence
  source: /note="Description of Artificial Sequence: Synthetic polypeptide"
DVQLTQSPSFLSASVGDRVTITCRASKSISKDLAWYQQKPGKAPKLLIYSGSTLQSGVPSRFSGSGSGTEFTLTISSLQPEDFATYYCQQHNKYPYTFGGGTKVEIK

SEQ ID NO: 2451 - DNA, 1458 bp, Artificial Sequence
  source: /note="Description of Artificial Sequence: Synthetic polynucleotide"
atggccctccctgtcaccgccctgctgcttccgctggctcttctgctccacgccgctcggccccaagtgcagctggtccagtcgggagccgaagtcaagaagcccggcgctagcgtgaaagtgtcctgcaaagcctccgggtacacattcacctcctactggatgaattgggtcagacaggcgcccggccagggactcgagtggatgggaaggattgatccttacgactccgaaacccattacaaccagaagttcaaggaccgcgtgaccatgactgtggataagtccacttccaccgcttacatggagctgtccagcctgcgctccgaggataccgcagtgtactactgcgcccggggaaactgggacgactattggggacagggaactaccgtgaccgtgtcaagcgggggtggcggtagcggaggagggggctccggcggcggcggctcagggggcggaggaagcgaagtggtgctgacccagtcgcccgcaaccctctctctgtcgccgggagaacgcgccactctttcctgtcgggcgtccaagagcatctcaaaggacctcgcctggtaccagcagaagcctggtcaagccccgcggctgctgatctactccggctccacgctgcaatcaggaatcccagccagattttccggttcggggtcggggactgacttcaccttgaccattagctcgctggaacctgaggacttcgccgtgtattactgccagcagcacaacaagtacccgtacaccttcggaggcggtactaaggtcgagatcaagaccactaccccagcaccgaggccacccaccccggctcctaccatcgcctcccagcctctgtccctgcgtccggaggcatgtagacccgcagctggtggggccgtgcatacccggggtcttgacttcgcctgcgatatctacatttgggcccctctggctggtacttgcggggtcctgctgctttcactcgtgatcactctttactgtaagcgcggtcggaagaagctgctgtacatctttaagcaacccttcatgaggcctgtgcagactactcaagaggaggacggctgttcatgccggttcccagaggaggaggaaggcggctgcgaactgcgcgtgaaattcagccgcagcgcagatgctccagcctacaagcaggggcagaaccagctctacaacgaactcaatcttggtcggagagaggagtacgacgtgctggacaagcggagaggacgggacccagaaatgggcgggaagccgcgcagaaagaatccccaagagggcctgtacaacgagctccaaaaggataagatggcagaagcctatagcgagattggtatgaaaggggaacgcagaagaggcaaaggccacgacggactgtaccagggactcagcaccgccaccaaggacacctatgacgctcttcacatgcaggccctgccgcctcgg

SEQ ID NO: 2452 - protein, 486 aa, Artificial Sequence
  source: /note="Description of Artificial Sequence: Synthetic polypeptide"
MALPVTALLLPLALLLHAARPQVQLVQSGAEVKKPGASVKVSCKASGYTFTSYWMNWVRQAPGQGLEWMGRIDPYDSETHYNQKFKDRVTMTVDKSTSTAYMELSSLRSEDTAVYYCARGNWDDYWGQGTTVTVSSGGGGSGGGGSGGGGSGGGGSEVVLTQSPATLSLSPGERATLSCRASKSISKDLAWYQQKPGQAPRLLIYSGSTLQSGIPARFSGSGSGTDFTLTISSLEPEDFAVYYCQQHNKYPYTFGGGTKVEIKTTTPAPRPPTPAPTIASQPLSLRPEACRPAAGGAVHTRGLDFACDIYIWAPLAGTCGVLLLSLVITLYCKRGRKKLLYIFKQPFMRPVQTTQEEDGCSCRFPEEEEGGCELRVKFSRSADAPAYKQGQNQLYNELNLGRREEYDVLDKRRGRDPEMGGKPRRKNPQEGLYNELQKDKMAEAYSEIGMKGERRRGKGHDGLYQGLSTATKDTYDALHMQALPPR

SEQ ID NO: 2453 - protein, 263 aa, Artificial Sequence
  source: /note="Description of Artificial Sequence: Synthetic polypeptide"
MALPVTALLLPLALLLHAARPQVQLVQSGAEVKKPGASVKVSCKASGYTFTSYWMNWVRQAPGQGLEWMGRIDPYDSETHYNQKFKDRVTMTVDKSTSTAYMELSSLRSEDTAVYYCARGNWDDYWGQGTTVTVSSGGGGSGGGGSGGGGSGGGGSEVVLTQSPATLSLSPGERATLSCRASKSISKDLAWYQQKPGQAPRLLIYSGSTLQSGIPARFSGSGSGTDFTLTISSLEPEDFAVYYCQQHNKYPYTFGGGTKVEIK

SEQ ID NO: 2454 - protein, 107 aa, Artificial Sequence
  source: /note="Description of Artificial Sequence: Synthetic polypeptide"
EVVLTQSPATLSLSPGERATLSCRASKSISKDLAWYQQKPGQAPRLLIYSGSTLQSGIPARFSGSGSGTDFTLTISSLEPEDFAVYYCQQHNKYPYTFGGGTKVEIK

SEQ ID NO: 2455 - DNA, 1458 bp, Artificial Sequence
  source: /note="Description of Artificial Sequence: Synthetic polynucleotide"
atggccctccctgtcaccgccctgctgcttccgctggctcttctgctccacgccgctcggccccaagtgcagctggtccagtcgggagccgaagtcaagaagcccggcgctagcgtgaaagtgtcctgcaaagcctccgggtacacattcacctcctactggatgaattgggtcagacaggcgcccggccagggactcgagtggatgggaaggattgatccttacgactccgaaacccattacaaccagaagttcaaggaccgcgtgaccatgactgtggataagtccacttccaccgcttacatggagctgtccagcctgcgctccgaggataccgcagtgtactactgcgcccggggaaactgggacgactattggggacagggaactaccgtgaccgtgtcaagcgggggtggcggtagcggaggagggggctccggcggcggcggctcagggggcggaggaagcgacgtcgtgatgacccagtcaccggcattcctgtccgtgactcccggagaaaaggtcacgattacttgccgggcgtccaagagcatctccaaggacctcgcctggtaccaacagaagccggaccaggcccctaagctgttgatctactcggggtccacccttcaatcgggagtgccatcgcggtttagcggttcgggttctgggaccgacttcactttcaccatctcctcactggaagccgaggatgccgccacttactactgtcagcagcacaacaagtatccgtacaccttcggaggcggtaccaaagtggagatcaagaccactaccccagcaccgaggccacccaccccggctcctaccatcgcctcccagcctctgtccctgcgtccggaggcatgtagacccgcagctggtggggccgtgcatacccggggtcttgacttcgcctgcgatatctacatttgggcccctctggctggtacttgcggggtcctgctgctttcactcgtgatcactctttactgtaagcgcggtcggaagaagctgctgtacatctttaagcaacccttcatgaggcctgtgcagactactcaagaggaggacggctgttcatgccggttcccagaggaggaggaaggcggctgcgaactgcgcgtgaaattcagccgcagcgcagatgctccagcctacaagcaggggcagaaccagctctacaacgaactcaatcttggtcggagagaggagtacgacgtgctggacaagcggagaggacgggacccagaaatgggcgggaagccgcgcagaaagaatccccaagagggcctgtacaacgagctccaaaaggataagatggcagaagcctatagcgagattggtatgaaaggggaacgcagaagaggcaaaggccacgacggactgtaccagggactcagcaccgccaccaaggacacctatgacgctcttcacatgcaggccctgccgcctcgg

SEQ ID NO: 2456 - protein, 486 aa, Artificial Sequence
  source: /note="Description of Artificial Sequence: Synthetic polypeptide"
MALPVTALLLPLALLLHAARPQVQLVQSGAEVKKPGASVKVSCKASGYTFTSYWMNWVRQAPGQGLEWMGRIDPYDSETHYNQKFKDRVTMTVDKSTSTAYMELSSLRSEDTAVYYCARGNWDDYWGQGTTVTVSSGGGGSGGGGSGGGGSGGGGSDVVMTQSPAFLSVTPGEKVTITCRASKSISKDLAWYQQKPDQAPKLLIYSGSTLQSGVPSRFSGSGSGTDFTFTISSLEAEDAATYYCQQHNKYPYTFGGGTKVEIKTTTPAPRPPTPAPTIASQPLSLRPEACRPAAGGAVHTRGLDFACDIYIWAPLAGTCGVLLLSLVITLYCKRGRKKLLYIFKQPFMRPVQTTQEEDGCSCRFPEEEEGGCELRVKFSRSADAPAYKQGQNQLYNELNLGRREEYDVLDKRRGRDPEMGGKPRRKNPQEGLYNELQKDKMAEAYSEIGMKGERRRGKGHDGLYQGLSTATKDTYDALHMQALPPR

SEQ ID NO: 2457 - protein, 263 aa, Artificial Sequence
  source: /note="Description of Artificial Sequence: Synthetic polypeptide"
MALPVTALLLPLALLLHAARPQVQLVQSGAEVKKPGASVKVSCKASGYTFTSYWMNWVRQAPGQGLEWMGRIDPYDSETHYNQKFKDRVTMTVDKSTSTAYMELSSLRSEDTAVYYCARGNWDDYWGQGTTVTVSSGGGGSGGGGSGGGGSGGGGSDVVMTQSPAFLSVTPGEKVTITCRASKSISKDLAWYQQKPDQAPKLLIYSGSTLQSGVPSRFSGSGSGTDFTFTISSLEAEDAATYYCQQHNKYPYTFGGGTKVEIK

SEQ ID NO: 2458 - protein, 107 aa, Artificial Sequence
  source: /note="Description of Artificial Sequence: Synthetic polypeptide"
DVVMTQSPAFLSVTPGEKVTITCRASKSISKDLAWYQQKPDQAPKLLIYSGSTLQSGVPSRFSGSGSGTDFTFTISSLEAEDAATYYCQQHNKYPYTFGGGTKVEIK

SEQ ID NO: 2459 - DNA, 1458 bp, Artificial Sequence
  source: /note="Description of Artificial Sequence: Synthetic polynucleotide"
atggccctccctgtcaccgccctgctgcttccgctggctcttctgctccacgccgctcggccccaagtgcagctggtccagtcgggagccgaagtcaagaagcccggcgctagcgtgaaagtgtcctgcaaagcctccgggtacacattcacctcctactggatgaattgggtcagacaggcgcccggccagggactcgagtggatgggaaggattgatccttacgactccgaaacccattacaaccagaagttcaaggaccgcgtgaccatgactgtggataagtccacttccaccgcttacatggagctgtccagcctgcgctccgaggataccgcagtgtactactgcgcccggggaaactgggacgactattggggacagggaactaccgtgaccgtgtcaagcgggggtggcggtagcggaggagggggctccggcggcggcggctcagggggcggaggaagcgacgtggtcatgactcagtccccggactcactcgcggtgtcgcttggagagagagcgaccatcaactgtcgggcctcaaagagcatcagcaaggacctggcctggtaccagcagaagccgggacagccgccaaagctgctgatctactccgggtccaccttgcaatctggtgtccctgaccggttctccggttccgggtcgggtaccgacttcacgctcactatttcgtcgctgcaagccgaagatgtggccgtgtactattgccaacagcacaacaagtacccctacacttttggcggaggcaccaaggtggaaatcaagaccactaccccagcaccgaggccacccaccccggctcctaccatcgcctcccagcctctgtccctgcgtccggaggcatgtagacccgcagctggtggggccgtgcatacccggggtcttgacttcgcctgcgatatctacatttgggcccctctggctggtacttgcggggtcctgctgctttcactcgtgatcactctttactgtaagcgcggtcggaagaagctgctgtacatctttaagcaacccttcatgaggcctgtgcagactactcaagaggaggacggctgttcatgccggttcccagaggaggaggaaggcggctgcgaactgcgcgtgaaattcagccgcagcgcagatgctccagcctacaagcaggggcagaaccagctctacaacgaactcaatcttggtcggagagaggagtacgacgtgctggacaagcggagaggacgggacccagaaatgggcgggaagccgcgcagaaagaatccccaagagggcctgtacaacgagctccaaaaggataagatggcagaagcctatagcgagattggtatgaaaggggaacgcagaagaggcaaaggccacgacggactgtaccagggactcagcaccgccaccaaggacacctatgacgctcttcacatgcaggccctgccgcctcgg

SEQ ID NO: 2460 - protein, 486 aa, Artificial Sequence
  source: /note="Description of Artificial Sequence: Synthetic polypeptide"
MALPVTALLLPLALLLHAARPQVQLVQSGAEVKKPGASVKVSCKASGYTFTSYWMNWVRQAPGQGLEWMGRIDPYDSETHYNQKFKDRVTMTVDKSTSTAYMELSSLRSEDTAVYYCARGNWDDYWGQGTTVTVSSGGGGSGGGGSGGGGSGGGGSDVVMTQSPDSLAVSLGERATINCRASKSISKDLAWYQQKPGQPPKLLIYSGSTLQSGVPDRFSGSGSGTDFTLTISSLQAEDVAVYYCQQHNKYPYTFGGGTKVEIKTTTPAPRPPTPAPTIASQPLSLRPEACRPAAGGAVHTRGLDFACDIYIWAPLAGTCGVLLLSLVITLYCKRGRKKLLYIFKQPFMRPVQTTQEEDGCSCRFPEEEEGGCELRVKFSRSADAPAYKQGQNQLYNELNLGRREEYDVLDKRRGRDPEMGGKPRRKNPQEGLYNELQKDKMAEAYSEIGMKGERRRGKGHDGLYQGLSTATKDTYDALHMQALPPR

SEQ ID NO: 2461 - protein, 263 aa, Artificial Sequence
  source: /note="Description of Artificial Sequence: Synthetic polypeptide"
MALPVTALLLPLALLLHAARPQVQLVQSGAEVKKPGASVKVSCKASGYTFTSYWMNWVRQAPGQGLEWMGRIDPYDSETHYNQKFKDRVTMTVDKSTSTAYMELSSLRSEDTAVYYCARGNWDDYWGQGTTVTVSSGGGGSGGGGSGGGGSGGGGSDVVMTQSPDSLAVSLGERATINCRASKSISKDLAWYQQKPGQPPKLLIYSGSTLQSGVPDRFSGSGSGTDFTLTISSLQAEDVAVYYCQQHNKYPYTFGGGTKVEIK

SEQ ID NO: 2462 - protein, 107 aa, Artificial Sequence
  source: /note="Description of Artificial Sequence: Synthetic polypeptide"
DVVMTQSPDSLAVSLGERATINCRASKSISKDLAWYQQKPGQPPKLLIYSGSTLQSGVPDRFSGSGSGTDFTLTISSLQAEDVAVYYCQQHNKYPYTFGGGTKVEIK

SEQ ID NO: 2463 - DNA, 1458 bp, Artificial Sequence
  source: /note="Description of Artificial Sequence: Synthetic polynucleotide"
atggccctccctgtcaccgccctgctgcttccgctggctcttctgctccacgccgctcggcccgacgtgcagctcacccagtcgccctcatttctgtcggcctcagtgggagacagagtgaccattacttgtcgggcctccaagagcatctccaaggacctggcctggtatcagcagaagccaggaaaggcgcctaagttgctcatctactcggggtcgaccctgcaatctggcgtgccgtcccggttctccggttcgggaagcggtaccgaattcacccttactatctcctccctgcaaccggaggacttcgccacctactactgccaacagcacaacaagtacccgtacactttcgggggtggcacgaaggtcgaaatcaaggggggtggcggtagcggaggagggggctccggcggcggcggctcagggggcggaggaagccaagtgcagctggtccagtcgggagccgaagtcaagaagcccggcgctagcgtgaaagtgtcctgcaaagcctccgggtacacattcacctcctactggatgaattgggtcagacaggcgcccggccagggactcgagtggatgggaaggattgatccttacgactccgaaacccattacaaccagaagttcaaggaccgcgtgaccatgactgtggataagtccacttccaccgcttacatggagctgtccagcctgcgctccgaggataccgcagtgtactactgcgcccggggaaactgggacgactattggggacagggaactaccgtgaccgtgtcaagcaccactaccccagcaccgaggccacccaccccggctcctaccatcgcctcccagcctctgtccctgcgtccggaggcatgtagacccgcagctggtggggccgtgcatacccggggtcttgacttcgcctgcgatatctacatttgggcccctctggctggtacttgcggggtcctgctgctttcactcgtgatcactctttactgtaagcgcggtcggaagaagctgctgtacatctttaagcaacccttcatgaggcctgtgcagactactcaagaggaggacggctgttcatgccggttcccagaggaggaggaaggcggctgcgaactgcgcgtgaaattcagccgcagcgcagatgctccagcctacaagcaggggcagaaccagctctacaacgaactcaatcttggtcggagagaggagtacgacgtgctggacaagcggagaggacgggacccagaaatgggcgggaagccgcgcagaaagaatccccaagagggcctgtacaacgagctccaaaaggataagatggcagaagcctatagcgagattggtatgaaaggggaacgcagaagaggcaaaggccacgacggactgtaccagggactcagcaccgccaccaaggacacctatgacgctcttcacatgcaggccctgccgcctcgg

SEQ ID NO: 2464 - protein, 486 aa, Artificial Sequence
  source: /note="Description of Artificial Sequence: Synthetic polypeptide"
MALPVTALLLPLALLLHAARPDVQLTQSPSFLSASVGDRVTITCRASKSISKDLAWYQQKPGKAPKLLIYSGSTLQSGVPSRFSGSGSGTEFTLTISSLQPEDFATYYCQQHNKYPYTFGGGTKVEIKGGGGSGGGGSGGGGSGGGGSQVQLVQSGAEVKKPGASVKVSCKASGYTFTSYWMNWVRQAPGQGLEWMGRIDPYDSETHYNQKFKDRVTMTVDKSTSTAYMELSSLRSEDTAVYYCARGNWDDYWGQGTTVTVSSTTTPAPRPPTPAPTIASQPLSLRPEACRPAAGGAVHTRGLDFACDIYIWAPLAGTCGVLLLSLVITLYCKRGRKKLLYIFKQPFMRPVQTTQEEDGCSCRFPEEEEGGCELRVKFSRSADAPAYKQGQNQLYNELNLGRREEYDVLDKRRGRDPEMGGKPRRKNPQEGLYNELQKDKMAEAYSEIGMKGERRRGKGHDGLYQGLSTATKDTYDALHMQALPPR

SEQ ID NO: 2465 - protein, 263 aa, Artificial Sequence
  source: /note="Description of Artificial Sequence: Synthetic polypeptide"
MALPVTALLLPLALLLHAARPDVQLTQSPSFLSASVGDRVTITCRASKSISKDLAWYQQKPGKAPKLLIYSGSTLQSGVPSRFSGSGSGTEFTLTISSLQPEDFATYYCQQHNKYPYTFGGGTKVEIKGGGGSGGGGSGGGGSGGGGSQVQLVQSGAEVKKPGASVKVSCKASGYTFTSYWMNWVRQAPGQGLEWMGRIDPYDSETHYNQKFKDRVTMTVDKSTSTAYMELSSLRSEDTAVYYCARGNWDDYWGQGTTVTVSS

SEQ ID NO: 2466 - DNA, 1458 bp, Artificial Sequence
  source: /note="Description of Artificial Sequence: Synthetic polynucleotide"
atggccctccctgtcaccgccctgctgcttccgctggctcttctgctccacgccgctcggcccgaagtggtgctgacccagtcgcccgcaaccctctctctgtcgccgggagaacgcgccactctttcctgtcgggcgtccaagagcatctcaaaggacctcgcctggtaccagcagaagcctggtcaagccccgcggctgctgatctactccggctccacgctgcaatcaggaatcccagccagattttccggttcggggtcggggactgacttcaccttgaccattagctcgctggaacctgaggacttcgccgtgtattactgccagcagcacaacaagtacccgtacaccttcggaggcggtactaaggtcgagatcaaggggggtggcggtagcggaggagggggctccggcggcggcggctcagggggcggaggaagccaagtgcagctggtccagtcgggagccgaagtcaagaagcccggcgctagcgtgaaagtgtcctgcaaagcctccgggtacacattcacctcctactggatgaattgggtcagacaggcgcccggccagggactcgagtggatgggaaggattgatccttacgactccgaaacccattacaaccagaagttcaaggaccgcgtgaccatgactgtggataagtccacttccaccgcttacatggagctgtccagcctgcgctccgaggataccgcagtgtactactgcgcccggggaaactgggacgactattggggacagggaactaccgtgaccgtgtcaagcaccactaccccagcaccgaggccacccaccccggctcctaccatcgcctcccagcctctgtccctgcgtccggaggcatgtagacccgcagctggtggggccgtgcatacccggggtcttgacttcgcctgcgatatctacatttgggcccctctggctggtacttgcggggtcctgctgctttcactcgtgatcactctttactgtaagcgcggtcggaagaagctgctgtacatctttaagcaacccttcatgaggcctgtgcagactactcaagaggaggacggctgttcatgccggttcccagaggaggaggaaggcggctgcgaactgcgcgtgaaattcagccgcagcgcagatgctccagcctacaagcaggggcagaaccagctctacaacgaactcaatcttggtcggagagaggagtacgacgtgctggacaagcggagaggacgggacccagaaatgggcgggaagccgcgcagaaagaatccccaagagggcctgtacaacgagctccaaaaggataagatggcagaagcctatagcgagattggtatgaaaggggaacgcagaagaggcaaaggccacgacggactgtaccagggactcagcaccgccaccaaggacacctatgacgctcttcacatgcaggccctgccgcctcgg

SEQ ID NO: 2467 - protein, 486 aa, Artificial Sequence
  source: /note="Description of Artificial Sequence: Synthetic polypeptide"
MALPVTALLLPLALLLHAARPEVVLTQSPATLSLSPGERATLSCRASKSISKDLAWYQQKPGQAPRLLIYSGSTLQSGIPARFSGSGSGTDFTLTISSLEPEDFAVYYCQQHNKYPYTFGGGTKVEIKGGGGSGGGGSGGGGSGGGGSQVQLVQSGAEVKKPGASVKVSCKASGYTFTSYWMNWVRQAPGQGLEWMGRIDPYDSETHYNQKFKDRVTMTVDKSTSTAYMELSSLRSEDTAVYYCARGNWDDYWGQGTTVTVSSTTTPAPRPPTPAPTIASQPLSLRPEACRPAAGGAVHTRGLDFACDIYIWAPLAGTCGVLLLSLVITLYCKRGRKKLLYIFKQPFMRPVQTTQEEDGCSCRFPEEEEGGCELRVKFSRSADAPAYKQGQNQLYNELNLGRREEYDVLDKRRGRDPEMGGKPRRKNPQEGLYNELQKDKMAEAYSEIGMKGERRRGKGHDGLYQGLSTATKDTYDALHMQALPPR

SEQ ID NO: 2468 - protein, 263 aa, Artificial Sequence
  source: /note="Description of Artificial Sequence: Synthetic polypeptide"
MALPVTALLLPLALLLHAARPEVVLTQSPATLSLSPGERATLSCRASKSISKDLAWYQQKPGQAPRLLIYSGSTLQSGIPARFSGSGSGTDFTLTISSLEPEDFAVYYCQQHNKYPYTFGGGTKVEIKGGGGSGGGGSGGGGSGGGGSQVQLVQSGAEVKKPGASVKVSCKASGYTFTSYWMNWVRQAPGQGLEWMGRIDPYDSETHYNQKFKDRVTMTVDKSTSTAYMELSSLRSEDTAVYYCARGNWDDYWGQGTTVTVSS

SEQ ID NO: 2469 - DNA, 1458 bp, Artificial Sequence
  source: /note="Description of Artificial Sequence: Synthetic polynucleotide"
atggccctccctgtcaccgccctgctgcttccgctggctcttctgctccacgccgctcggcccgacgtcgtgatgacccagtcaccggcattcctgtccgtgactcccggagaaaaggtcacgattacttgccgggcgtccaagagcatctccaaggacctcgcctggtaccaacagaagccggaccaggcccctaagctgttgatctactcggggtccacccttcaatcgggagtgccatcgcggtttagcggttcgggttctgggaccgacttcactttcaccatctcctcactggaagccgaggatgccgccacttactactgtcagcagcacaacaagtatccgtacaccttcggaggcggtaccaaagtggagatcaaggggggtggcggtagcggaggagggggctccggcggcggcggctcagggggcggaggaagccaagtgcagctggtccagtcgggagccgaagtcaagaagcccggcgctagcgtgaaagtgtcctgcaaagcctccgggtacacattcacctcctactggatgaattgggtcagacaggcgcccggccagggactcgagtggatgggaaggattgatccttacgactccgaaacccattacaaccagaagttcaaggaccgcgtgaccatgactgtggataagtccacttccaccgcttacatggagctgtccagcctgcgctccgaggataccgcagtgtactactgcgcccggggaaactgggacgactattggggacagggaactaccgtgaccgtgtcaagcaccactaccccagcaccgaggccacccaccccggctcctaccatcgcctcccagcctctgtccctgcgtccggaggcatgtagacccgcagctggtggggccgtgcatacccggggtcttgacttcgcctgcgatatctacatttgggcccctctggctggtacttgcggggtcctgctgctttcactcgtgatcactctttactgtaagcgcggtcggaagaagctgctgtacatctttaagcaacccttcatgaggcctgtgcagactactcaagaggaggacggctgttcatgccggttcccagaggaggaggaaggcggctgcgaactgcgcgtgaaattcagccgcagcgcagatgctccagcctacaagcaggggcagaaccagctctacaacgaactcaatcttggtcggagagaggagtacgacgtgctggacaagcggagaggacgggacccagaaatgggcgggaagccgcgcagaaagaatccccaagagggcctgtacaacgagctccaaaaggataagatggcagaagcctatagcgagattggtatgaaaggggaacgcagaagaggcaaaggccacgacggactgtaccagggactcagcaccgccaccaaggacacctatgacgctcttcacatgcaggccctgccgcctcgg

SEQ ID NO: 2470 - protein, 486 aa, Artificial Sequence
  source: /note="Description of Artificial Sequence: Synthetic polypeptide"
MALPVTALLLPLALLLHAARPDVVMTQSPAFLSVTPGEKVTITCRASKSISKDLAWYQQKPDQAPKLLIYSGSTLQSGVPSRFSGSGSGTDFTFTISSLEAEDAATYYCQQHNKYPYTFGGGTKVEIKGGGGSGGGGSGGGGSGGGGSQVQLVQSGAEVKKPGASVKVSCKASGYTFTSYWMNWVRQAPGQGLEWMGRIDPYDSETHYNQKFKDRVTMTVDKSTSTAYMELSSLRSEDTAVYYCARGNWDDYWGQGTTVTVSSTTTPAPRPPTPAPTIASQPLSLRPEACRPAAGGAVHTRGLDFACDIYIWAPLAGTCGVLLLSLVITLYCKRGRKKLLYIFKQPFMRPVQTTQEEDGCSCRFPEEEEGGCELRVKFSRSADAPAYKQGQNQLYNELNLGRREEYDVLDKRRGRDPEMGGKPRRKNPQEGLYNELQKDKMAEAYSEIGMKGERRRGKGHDGLYQGLSTATKDTYDALHMQALPPR

SEQ ID NO: 2471 - protein, 263 aa, Artificial Sequence
  source: /note="Description of Artificial Sequence: Synthetic polypeptide"
MALPVTALLLPLALLLHAARPDVVMTQSPAFLSVTPGEKVTITCRASKSISKDLAWYQQKPDQAPKLLIYSGSTLQSGVPSRFSGSGSGTDFTFTISSLEAEDAATYYCQQHNKYPYTFGGGTKVEIKGGGGSGGGGSGGGGSGGGGSQVQLVQSGAEVKKPGASVKVSCKASGYTFTSYWMNWVRQAPGQGLEWMGRIDPYDSETHYNQKFKDRVTMTVDKSTSTAYMELSSLRSEDTAVYYCARGNWDDYWGQGTTVTVSS

SEQ ID NO: 2472 - DNA, 1458 bp, Artificial Sequence
  source: /note="Description of Artificial Sequence: Synthetic polynucleotide"
atggccctccctgtcaccgccctgctgcttccgctggctcttctgctccacgccgctcggcccgacgtggtcatgactcagtccccggactcactcgcggtgtcgcttggagagagagcgaccatcaactgtcgggcctcaaagagcatcagcaaggacctggcctggtaccagcagaagccgggacagccgccaaagctgctgatctactccgggtccaccttgcaatctggtgtccctgaccggttctccggttccgggtcgggtaccgacttcacgctcactatttcgtcgctgcaagccgaagatgtggccgtgtactattgccaacagcacaacaagtacccctacacttttggcggaggcaccaaggtggaaatcaaggggggtggcggtagcggaggagggggctccggcggcggcggctcagggggcggaggaagccaagtgcagctggtccagtcgggagccgaagtcaagaagcccggcgctagcgtgaaagtgtcctgcaaagcctccgggtacacattcacctcctactggatgaattgggtcagacaggcgcccggccagggactcgagtggatgggaaggattgatccttacgactccgaaacccattacaaccagaagttcaaggaccgcgtgaccatgactgtggataagtccacttccaccgcttacatggagctgtccagcctgcgctccgaggataccgcagtgtactactgcgcccggggaaactgggacgactattggggacagggaactaccgtgaccgtgtcaagcaccactaccccagcaccgaggccacccaccccggctcctaccatcgcctcccagcctctgtccctgcgtccggaggcatgtagacccgcagctggtggggccgtgcatacccggggtcttgacttcgcctgcgatatctacatttgggcccctctggctggtacttgcggggtcctgctgctttcactcgtgatcactctttactgtaagcgcggtcggaagaagctgctgtacatctttaagcaacccttcatgaggcctgtgcagactactcaagaggaggacggctgttcatgccggttcccagaggaggaggaaggcggctgcgaactgcgcgtgaaattcagccgcagcgcagatgctccagcctacaagcaggggcagaaccagctctacaacgaactcaatcttggtcggagagaggagtacgacgtgctggacaagcggagaggacgggacccagaaatgggcgggaagccgcgcagaaagaatccccaagagggcctgtacaacgagctccaaaaggataagatggcagaagcctatagcgagattggtatgaaaggggaacgcagaagaggcaaaggccacgacggactgtaccagggactcagcaccgccaccaaggacacctatgacgctcttcacatgcaggccctgccgcctcgg

SEQ ID NO: 2473 - protein, 486 aa, Artificial Sequence
  source: /note="Description of Artificial Sequence: Synthetic polypeptide"
MALPVTALLLPLALLLHAARPDVVMTQSPDSLAVSLGERATINCRASKSISKDLAWYQQKPGQPPKLLIYSGSTLQSGVPDRFSGSGSGTDFTLTISSLQAEDVAVYYCQQHNKYPYTFGGGTKVEIKGGGGSGGGGSGGGGSGGGGSQVQLVQSGAEVKKPGASVKVSCKASGYTFTSYWMNWVRQAPGQGLEWMGRIDPYDSETHYNQKFKDRVTMTVDKSTSTAYMELSSLRSEDTAVYYCARGNWDDYWGQGTTVTVSSTTTPAPRPPTPAPTIASQPLSLRPEACRPAAGGAVHTRGLDFACDIYIWAPLAGTCGVLLLSLVITLYCKRGRKKLLYIFKQPFMRPVQTTQEEDGCSCRFPEEEEGGCELRVKFSRSADAPAYKQGQNQLYNELNLGRREEYDVLDKRRGRDPEMGGKPRRKNPQEGLYNELQKDKMAEAYSEIGMKGERRRGKGHDGLYQGLSTATKDTYDALHMQALPPR

SEQ ID NO: 2474 - protein, 263 aa, Artificial Sequence
  source: /note="Description of Artificial Sequence: Synthetic polypeptide"
MALPVTALLLPLALLLHAARPDVVMTQSPDSLAVSLGERATINCRASKSISKDLAWYQQKPGQPPKLLIYSGSTLQSGVPDRFSGSGSGTDFTLTISSLQAEDVAVYYCQQHNKYPYTFGGGTKVEIKGGGGSGGGGSGGGGSGGGGSQVQLVQSGAEVKKPGASVKVSCKASGYTFTSYWMNWVRQAPGQGLEWMGRIDPYDSETHYNQKFKDRVTMTVDKSTSTAYMELSSLRSEDTAVYYCARGNWDDYWGQGTTVTVSS

SEQ ID NO: 2475 - DNA, 1458 bp, Artificial Sequence
  source: /note="Description of Artificial Sequence: Synthetic polynucleotide"
atggccctccctgtcaccgccctgctgcttccgctggctcttctgctccacgccgctcggccccaagtgcagctggtgcagtcaggcagcgaactgaagaagcccggagcctccgtcaaagtgtcctgcaaagcctcgggatacaccttcacctcctactggatgaactgggtccgccaggcacctggacaggggctggagtggatgggaaggatcgatccctacgattccgaaacccattacaatcagaagttcaaggaccggtttgtgttctccgtggacaagtccgtgtccaccgcctacctccaaattagcagcctgaaggcggaggatacagctgtctactactgcgctcgcggaaactgggatgactattggggccagggaactaccgtgactgtgtcctccgggggtggcggtagcggaggagggggctccggcggcggcggctcagggggcggaggaagcgacgtgcagctcacccagtcgccctcatttctgtcggcctcagtgggagacagagtgaccattacttgtcgggcctccaagagcatctccaaggacctggcctggtatcagcagaagccaggaaaggcgcctaagttgctcatctactcggggtcgaccctgcaatctggcgtgccgtcccggttctccggttcgggaagcggtaccgaattcacccttactatctcctccctgcaaccggaggacttcgccacctactactgccaacagcacaacaagtacccgtacactttcgggggtggcacgaaggtcgaaatcaagaccactaccccagcaccgaggccacccaccccggctcctaccatcgcctcccagcctctgtccctgcgtccggaggcatgtagacccgcagctggtggggccgtgcatacccggggtcttgacttcgcctgcgatatctacatttgggcccctctggctggtacttgcggggtcctgctgctttcactcgtgatcactctttactgtaagcgcggtcggaagaagctgctgtacatctttaagcaacccttcatgaggcctgtgcagactactcaagaggaggacggctgttcatgccggttcccagaggaggaggaaggcggctgcgaactgcgcgtgaaattcagccgcagcgcagatgctccagcctacaagcaggggcagaaccagctctacaacgaactcaatcttggtcggagagaggagtacgacgtgctggacaagcggagaggacgggacccagaaatgggcgggaagccgcgcagaaagaatccccaagagggcctgtacaacgagctccaaaaggataagatggcagaagcctatagcgagattggtatgaaaggggaacgcagaagaggcaaaggccacgacggactgtaccagggactcagcaccgccaccaaggacacctatgacgctcttcacatgcaggccctgccgcctcgg

SEQ ID NO: 2476 - protein, 486 aa, Artificial Sequence
  source: /note="Description of Artificial Sequence: Synthetic polypeptide"
MALPVTALLLPLALLLHAARPQVQLVQSGSELKKPGASVKVSCKASGYTFTSYWMNWVRQAPGQGLEWMGRIDPYDSETHYNQKFKDRFVFSVDKSVSTAYLQISSLKAEDTAVYYCARGNWDDYWGQGTTVTVSSGGGGSGGGGSGGGGSGGGGSDVQLTQSPSFLSASVGDRVTITCRASKSISKDLAWYQQKPGKAPKLLIYSGSTLQSGVPSRFSGSGSGTEFTLTISSLQPEDFATYYCQQHNKYPYTFGGGTKVEIKTTTPAPRPPTPAPTIASQPLSLRPEACRPAAGGAVHTRGLDFACDIYIWAPLAGTCGVLLLSLVITLYCKRGRKKLLYIFKQPFMRPVQTTQEEDGCSCRFPEEEEGGCELRVKFSRSADAPAYKQGQNQLYNELNLGRREEYDVLDKRRGRDPEMGGKPRRKNPQEGLYNELQKDKMAEAYSEIGMKGERRRGKGHDGLYQGLSTATKDTYDALHMQALPPR

SEQ ID NO: 2477 - protein, 263 aa, Artificial Sequence
  source: /note="Description of Artificial Sequence: Synthetic polypeptide"
MALPVTALLLPLALLLHAARPQVQLVQSGSELKKPGASVKVSCKASGYTFTSYWMNWVRQAPGQGLEWMGRIDPYDSETHYNQKFKDRFVFSVDKSVSTAYLQISSLKAEDTAVYYCARGNWDDYWGQGTTVTVSSGGGGSGGGGSGGGGSGGGGSDVQLTQSPSFLSASVGDRVTITCRASKSISKDLAWYQQKPGKAPKLLIYSGSTLQSGVPSRFSGSGSGTEFTLTISSLQPEDFATYYCQQHNKYPYTFGGGTKVEIK

SEQ ID NO: 2478 - protein, 115 aa, Artificial Sequence
  source: /note="Description of Artificial Sequence: Synthetic polypeptide"
QVQLVQSGSELKKPGASVKVSCKASGYTFTSYWMNWVRQAPGQGLEWMGRIDPYDSETHYNQKFKDRFVFSVDKSVSTAYLQISSLKAEDTAVYYCARGNWDDYWGQGTTVTVSS

SEQ ID NO: 2479 - DNA, 1458 bp, Artificial Sequence
  source: /note="Description of Artificial Sequence: Synthetic polynucleotide"
atggccctccctgtcaccgccctgctgcttccgctggctcttctgctccacgccgctcggccccaagtgcagctggtgcagtcaggcagcgaactgaagaagcccggagcctccgtcaaagtgtcctgcaaagcctcgggatacaccttcacctcctactggatgaactgggtccgccaggcacctggacaggggctggagtggatgggaaggatcgatccctacgattccgaaacccattacaatcagaagttcaaggaccggtttgtgttctccgtggacaagtccgtgtccaccgcctacctccaaattagcagcctgaaggcggaggatacagctgtctactactgcgctcgcggaaactgggatgactattggggccagggaactaccgtgactgtgtcctccgggggtggcggtagcggaggagggggctccggcggcggcggctcagggggcggaggaagcgaagtggtgctgacccagtcgcccgcaaccctctctctgtcgccgggagaacgcgccactctttcctgtcgggcgtccaagagcatctcaaaggacctcgcctggtaccagcagaagcctggtcaagccccgcggctgctgatctactccggctccacgctgcaatcaggaatcccagccagattttccggttcggggtcggggactgacttcaccttgaccattagctcgctggaacctgaggacttcgccgtgtattactgccagcagcacaacaagtacccgtacaccttcggaggcggtactaaggtcgagatcaagaccactaccccagcaccgaggccacccaccccggctcctaccatcgcctcccagcctctgtccctgcgtccggaggcatgtagacccgcagctggtggggccgtgcatacccggggtcttgacttcgcctgcgatatctacatttgggcccctctggctggtacttgcggggtcctgctgctttcactcgtgatcactctttactgtaagcgcggtcggaagaagctgctgtacatctttaagcaacccttcatgaggcctgtgcagactactcaagaggaggacggctgttcatgccggttcccagaggaggaggaaggcggctgcgaactgcgcgtgaaattcagccgcagcgcagatgctccagcctacaagcaggggcagaaccagctctacaacgaactcaatcttggtcggagagaggagtacgacgtgctggacaagcggagaggacgggacccagaaatgggcgggaagccgcgcagaaagaatccccaagagggcctgtacaacgagctccaaaaggataagatggcagaagcctatagcgagattggtatgaaaggggaacgcagaagaggcaaaggccacgacggactgtaccagggactcagcaccgccaccaaggacacctatgacgctcttcacatgcaggccctgccgcctcgg

SEQ ID NO: 2480 - protein, 486 aa, Artificial Sequence
  source: /note="Description of Artificial Sequence: Synthetic polypeptide"
MALPVTALLLPLALLLHAARPQVQLVQSGSELKKPGASVKVSCKASGYTFTSYWMNWVRQAPGQGLEWMGRIDPYDSETHYNQKFKDRFVFSVDKSVSTAYLQISSLKAEDTAVYYCARGNWDDYWGQGTTVTVSSGGGGSGGGGSGGGGSGGGGSEVVLTQSPATLSLSPGERATLSCRASKSISKDLAWYQQKPGQAPRLLIYSGSTLQSGIPARFSGSGSGTDFTLTISSLEPEDFAVYYCQQHNKYPYTFGGGTKVEIKTTTPAPRPPTPAPTIASQPLSLRPEACRPAAGGAVHTRGLDFACDIYIWAPLAGTCGVLLLSLVITLYCKRGRKKLLYIFKQPFMRPVQTTQEEDGCSCRFPEEEEGGCELRVKFSRSADAPAYKQGQNQLYNELNLGRREEYDVLDKRRGRDPEMGGKPRRKNPQEGLYNELQKDKMAEAYSEIGMKGERRRGKGHDGLYQGLSTATKDTYDALHMQALPPR

SEQ ID NO: 2481 - protein, 263 aa, Artificial Sequence
  source: /note="Description of Artificial Sequence: Synthetic polypeptide"
MALPVTALLLPLALLLHAARPQVQLVQSGSELKKPGASVKVSCKASGYTFTSYWMNWVRQAPGQGLEWMGRIDPYDSETHYNQKFKDRFVFSVDKSVSTAYLQISSLKAEDTAVYYCARGNWDDYWGQGTTVTVSSGGGGSGGGGSGGGGSGGGGSEVVLTQSPATLSLSPGERATLSCRASKSISKDLAWYQQKPGQAPRLLIYSGSTLQSGIPARFSGSGSGTDFTLTISSLEPEDFAVYYCQQHNKYPYTFGGGTKVEIK

SEQ ID NO: 2482 - DNA, 1458 bp, Artificial Sequence
  source: /note="Description of Artificial Sequence: Synthetic polynucleotide"
atggccctccctgtcaccgccctgctgcttccgctggctcttctgctccacgccgctcggccccaagtgcagctggtgcagtcaggcagcgaactgaagaagcccggagcctccgtcaaagtgtcctgcaaagcctcgggatacaccttcacctcctactggatgaactgggtccgccaggcacctggacaggggctggagtggatgggaaggatcgatccctacgattccgaaacccattacaatcagaagttcaaggaccggtttgtgttctccgtggacaagtccgtgtccaccgcctacctccaaattagcagcctgaaggcggaggatacagctgtctactactgcgctcgcggaaactgggatgactattggggccagggaactaccgtgactgtgtcctccgggggtggcggtagcggaggagggggctccggcggcggcggctcagggggcggaggaagcgacgtcgtgatgacccagtcaccggcattcctgtccgtgactcccggagaaaaggtcacgattacttgccgggcgtccaagagcatctccaaggacctcgcctggtaccaacagaagccggaccaggcccctaagctgttgatctactcggggtccacccttcaatcgggagtgccatcgcggtttagcggttcgggttctgggaccgacttcactttcaccatctcctcactggaagccgaggatgccgccacttactactgtcagcagcacaacaagtatccgtacaccttcggaggcggtaccaaagtggagatcaagaccactaccccagcaccgaggccacccaccccggctcctaccatcgcctcccagcctctgtccctgcgtccggaggcatgtagacccgcagctggtggggccgtgcatacccggggtcttgacttcgcctgcgatatctacatttgggcccctctggctggtacttgcggggtcctgctgctttcactcgtgatcactctttactgtaagcgcggtcggaagaagctgctgtacatctttaagcaacccttcatgaggcctgtgcagactactcaagaggaggacggctgttcatgccggttcccagaggaggaggaaggcggctgcgaactgcgcgtgaaattcagccgcagcgcagatgctccagcctacaagcaggggcagaaccagctctacaacgaactcaatcttggtcggagagaggagtacgacgtgctggacaagcggagaggacgggacccagaaatgggcgggaagccgcgcagaaagaatccccaagagggcctgtacaacgagctccaaaaggataagatggcagaagcctatagcgagattggtatgaaaggggaacgcagaagaggcaaaggccacgacggactgtaccagggactcagcaccgccaccaaggacacctatgacgctcttcacatgcaggccctgccgcctcgg

SEQ ID NO: 2483 - protein, 486 aa, Artificial Sequence
  source: /note="Description of Artificial Sequence: Synthetic polypeptide"
MALPVTALLLPLALLLHAARPQVQLVQSGSELKKPGASVKVSCKASGYTFTSYWMNWVRQAPGQGLEWMGRIDPYDSETHYNQKFKDRFVFSVDKSVSTAYLQISSLKAEDTAVYYCARGNWDDYWGQGTTVTVSSGGGGSGGGGSGGGGSGGGGSDVVMTQSPAFLSVTPGEKVTITCRASKSISKDLAWYQQKPDQAPKLLIYSGSTLQSGVPSRFSGSGSGTDFTFTISSLEAEDAATYYCQQHNKYPYTFGGGTKVEIKTTTPAPRPPTPAPTIASQPLSLRPEACRPAAGGAVHTRGLDFACDIYIWAPLAGTCGVLLLSLVITLYCKRGRKKLLYIFKQPFMRPVQTTQEEDGCSCRFPEEEEGGCELRVKFSRSADAPAYKQGQNQLYNELNLGRREEYDVLDKRRGRDPEMGGKPRRKNPQEGLYNELQKDKMAEAYSEIGMKGERRRGKGHDGLYQGLSTATKDTYDALHMQALPPR

SEQ ID NO: 2484 - protein, 263 aa, Artificial Sequence
  source: /note="Description of Artificial Sequence: Synthetic polypeptide"
MALPVTALLLPLALLLHAARPQVQLVQSGSELKKPGASVKVSCKASGYTFTSYWMNWVRQAPGQGLEWMGRIDPYDSETHYNQKFKDRFVFSVDKSVSTAYLQISSLKAEDTAVYYCARGNWDDYWGQGTTVTVSSGGGGSGGGGSGGGGSGGGGSDVVMTQSPAFLSVTPGEKVTITCRASKSISKDLAWYQQKPDQAPKLLIYSGSTLQSGVPSRFSGSGSGTDFTFTISSLEAEDAATYYCQQHNKYPYTFGGGTKVEIK

SEQ ID NO: 2485 - DNA, 1458 bp, Artificial Sequence
  source: /note="Description of Artificial Sequence: Synthetic polynucleotide"
atggccctccctgtcaccgccctgctgcttccgctggctcttctgctccacgccgctcggccccaagtgcagctggtgcagtcaggcagcgaactgaagaagcccggagcctccgtcaaagtgtcctgcaaagcctcgggatacaccttcacctcctactggatgaactgggtccgccaggcacctggacaggggctggagtggatgggaaggatcgatccctacgattccgaaacccattacaatcagaagttcaaggaccggtttgtgttctccgtggacaagtccgtgtccaccgcctacctccaaattagcagcctgaaggcggaggatacagctgtctactactgcgctcgcggaaactgggatgactattggggccagggaactaccgtgactgtgtcctccgggggtggcggtagcggaggagggggctccggcggcggcggctcagggggcggaggaagcgacgtggtcatgactcagtccccggactcactcgcggtgtcgcttggagagagagcgaccatcaactgtcgggcctcaaagagcatcagcaaggacctggcctggtaccagcagaagccgggacagccgccaaagctgctgatctactccgggtccaccttgcaatctggtgtccctgaccggttctccggttccgggtcgggtaccgacttcacgctcactatttcgtcgctgcaagccgaagatgtggccgtgtactattgccaacagcacaacaagtacccctacacttttggcggaggcaccaaggtggaaatcaagaccactaccccagcaccgaggccacccaccccggctcctaccatcgcctcccagcctctgtccctgcgtccggaggcatgtagacccgcagctggtggggccgtgcatacccggggtcttgacttcgcctgcgatatctacatttgggcccctctggctggtacttgcggggtcctgctgctttcactcgtgatcactctttactgtaagcgcggtcggaagaagctgctgtacatctttaagcaacccttcatgaggcctgtgcagactactcaagaggaggacggctgttcatgccggttcccagaggaggaggaaggcggctgcgaactgcgcgtgaaattcagccgcagcgcagatgctccagcctacaagcaggggcagaaccagctctacaacgaactcaatcttggtcggagagaggagtacgacgtgctggacaagcggagaggacgggacccagaaatgggcgggaagccgcgcagaaagaatccccaagagggcctgtacaacgagctccaaaaggataagatggcagaagcctatagcgagattggtatgaaaggggaacgcagaagaggcaaaggccacgacggactgtaccagggactcagcaccgccaccaaggacacctatgacgctcttcacatgcaggccctgccgcctcgg

SEQ ID NO: 2486 - protein, 486 aa, Artificial Sequence
  source: /note="Description of Artificial Sequence: Synthetic polypeptide"
MALPVTALLLPLALLLHAARPQVQLVQSGSELKKPGASVKVSCKASGYTFTSYWMNWVRQAPGQGLEWMGRIDPYDSETHYNQKFKDRFVFSVDKSVSTAYLQISSLKAEDTAVYYCARGNWDDYWGQGTTVTVSSGGGGSGGGGSGGGGSGGGGSDVVMTQSPDSLAVSLGERATINCRASKSISKDLAWYQQKPGQPPKLLIYSGSTLQSGVPDRFSGSGSGTDFTLTISSLQAEDVAVYYCQQHNKYPYTFGGGTKVEIKTTTPAPRPPTPAPTIASQPLSLRPEACRPAAGGAVHTRGLDFACDIYIWAPLAGTCGVLLLSLVITLYCKRGRKKLLYIFKQPFMRPVQTTQEEDGCSCRFPEEEEGGCELRVKFSRSADAPAYKQGQNQLYNELNLGRREEYDVLDKRRGRDPEMGGKPRRKNPQEGLYNELQKDKMAEAYSEIGMKGERRRGKGHDGLYQGLSTATKDTYDALHMQALPPR

SEQ ID NO: 2487 - protein, 263 aa, Artificial Sequence
  source: /note="Description of Artificial Sequence: Synthetic polypeptide"
MALPVTALLLPLALLLHAARPQVQLVQSGSELKKPGASVKVSCKASGYTFTSYWMNWVRQAPGQGLEWMGRIDPYDSETHYNQKFKDRFVFSVDKSVSTAYLQISSLKAEDTAVYYCARGNWDDYWGQGTTVTVSSGGGGSGGGGSGGGGSGGGGSDVVMTQSPDSLAVSLGERATINCRASKSISKDLAWYQQKPGQPPKLLIYSGSTLQSGVPDRFSGSGSGTDFTLTISSLQAEDVAVYYCQQHNKYPYTFGGGTKVEIK

SEQ ID NO: 2488 - DNA, 1458 bp, Artificial Sequence
  source: /note="Description of Artificial Sequence: Synthetic polynucleotide"
atggccctccctgtcaccgccctgctgcttccgctggctcttctgctccacgccgctcggcccgacgtgcagctcacccagtcgccctcatttctgtcggcctcagtgggagacagagtgaccattacttgtcgggcctccaagagcatctccaaggacctggcctggtatcagcagaagccaggaaaggcgcctaagttgctcatctactcggggtcgaccctgcaatctggcgtgccgtcccggttctccggttcgggaagcggtaccgaattcacccttactatctcctccctgcaaccggaggacttcgccacctactactgccaacagcacaacaagtacccgtacactttcgggggtggcacgaaggtcgaaatcaaggggggtggcggtagcggaggagggggctccggcggcggcggctcagggggcggaggaagccaagtgcagctggtgcagtcaggcagcgaactgaagaagcccggagcctccgtcaaagtgtcctgcaaagcctcgggatacaccttcacctcctactggatgaactgggtccgccaggcacctggacaggggctggagtggatgggaaggatcgatccctacgattccgaaacccattacaatcagaagttcaaggaccggtttgtgttctccgtggacaagtccgtgtccaccgcctacctccaaattagcagcctgaaggcggaggatacagctgtctactactgcgctcgcggaaactgggatgactattggggccagggaactaccgtgactgtgtcctccaccactaccccagcaccgaggccacccaccccggctcctaccatcgcctcccagcctctgtccctgcgtccggaggcatgtagacccgcagctggtggggccgtgcatacccggggtcttgacttcgcctgcgatatctacatttgggcccctctggctggtacttgcggggtcctgctgctttcactcgtgatcactctttactgtaagcgcggtcggaagaagctgctgtacatctttaagcaacccttcatgaggcctgtgcagactactcaagaggaggacggctgttcatgccggttcccagaggaggaggaaggcggctgcgaactgcgcgtgaaattcagccgcagcgcagatgctccagcctacaagcaggggcagaaccagctctacaacgaactcaatcttggtcggagagaggagtacgacgtgctggacaagcggagaggacgggacccagaaatgggcgggaagccgcgcagaaagaatccccaagagggcctgtacaacgagctccaaaaggataagatggcagaagcctatagcgagattggtatgaaaggggaacgcagaagaggcaaaggccacgacggactgtaccagggactcagcaccgccaccaaggacacctatgacgctcttcacatgcaggccctgccgcctcgg

SEQ ID NO: 2489 - protein, 486 aa, Artificial Sequence
  source: /note="Description of Artificial Sequence: Synthetic polypeptide"
MALPVTALLLPLALLLHAARPDVQLTQSPSFLSASVGDRVTITCRASKSISKDLAWYQQKPGKAPKLLIYSGSTLQSGVPSRFSGSGSGTEFTLTISSLQPEDFATYYCQQHNKYPYTFGGGTKVEIKGGGGSGGGGSGGGGSGGGGSQVQLVQSGSELKKPGASVKVSCKASGYTFTSYWMNWVRQAPGQGLEWMGRIDPYDSETHYNQKFKDRFVFSVDKSVSTAYLQISSLKAEDTAVYYCARGNWDDYWGQGTTVTVSSTTTPAPRPPTPAPTIASQPLSLRPEACRPAAGGAVHTRGLDFACDIYIWAPLAGTCGVLLLSLVITLYCKRGRKKLLYIFKQPFMRPVQTTQEEDGCSCRFPEEEEGGCELRVKFSRSADAPAYKQGQNQLYNELNLGRREEYDVLDKRRGRDPEMGGKPRRKNPQEGLYNELQKDKMAEAYSEIGMKGERRRGKGHDGLYQGLSTATKDTYDALHMQALPPR

SEQ ID NO: 2490 - protein, 263 aa, Artificial Sequence
  source: /note="Description of Artificial Sequence: Synthetic polypeptide"
MALPVTALLLPLALLLHAARPDVQLTQSPSFLSASVGDRVTITCRASKSISKDLAWYQQKPGKAPKLLIYSGSTLQSGVPSRFSGSGSGTEFTLTISSLQPEDFATYYCQQHNKYPYTFGGGTKVEIKGGGGSGGGGSGGGGSGGGGSQVQLVQSGSELKKPGASVKVSCKASGYTFTSYWMNWVRQAPGQGLEWMGRIDPYDSETHYNQKFKDRFVFSVDKSVSTAYLQISSLKAEDTAVYYCARGNWDDYWGQGTTVTVSS

SEQ ID NO: 2491 - DNA, 1458 bp, Artificial Sequence
  source: /note="Description of Artificial Sequence: Synthetic polynucleotide"
atggccctccctgtcaccgccctgctgcttccgctggctcttctgctccacgccgctcggcccgaagtggtgctgacccagtcgcccgcaaccctctctctgtcgccgggagaacgcgccactctttcctgtcgggcgtccaagagcatctcaaaggacctcgcctggtaccagcagaagcctggtcaagccccgcggctgctgatctactccggctccacgctgcaatcaggaatcccagccagattttccggttcggggtcggggactgacttcaccttgaccattagctcgctggaacctgaggacttcgccgtgtattactgccagcagcacaacaagtacccgtacaccttcggaggcggtactaaggtcgagatcaaggggggtggcggtagcggaggagggggctccggcggcggcggctcagggggcggaggaagccaagtgcagctggtgcagtcaggcagcgaactgaagaagcccggagcctccgtcaaagtgtcctgcaaagcctcgggatacaccttcacctcctactggatgaactgggtccgccaggcacctggacaggggctggagtggatgggaaggatcgatccctacgattccgaaacccattacaatcagaagttcaaggaccggtttgtgttctccgtggacaagtccgtgtccaccgcctacctccaaattagcagcctgaaggcggaggatacagctgtctactactgcgctcgcggaaactgggatgactattggggccagggaactaccgtgactgtgtcctccaccactaccccagcaccgaggccacccaccccggctcctaccatcgcctcccagcctctgtccctgcgtccggaggcatgtagacccgcagctggtggggccgtgcatacccggggtcttgacttcgcctgcgatatctacatttgggcccctctggctggtacttgcggggtcctgctgctttcactcgtgatcactctttactgtaagcgcggtcggaagaagctgctgtacatctttaagcaacccttcatgaggcctgtgcagactactcaagaggaggacggctgttcatgccggttcccagaggaggaggaaggcggctgcgaactgcgcgtgaaattcagccgcagcgcagatgctccagcctacaagcaggggcagaaccagctctacaacgaactcaatcttggtcggagagaggagtacgacgtgctggacaagcggagaggacgggacccagaaatgggcgggaagccgcgcagaaagaatccccaagagggcctgtacaacgagctccaaaaggataagatggcagaagcctatagcgagattggtatgaaaggggaacgcagaagaggcaaaggccacgacggactgtaccagggactcagcaccgccaccaaggacacctatgacgctcttcacatgcaggccctgccgcctcgg

SEQ ID NO: 2492 - protein, 486 aa, Artificial Sequence
  source: /note="Description of Artificial Sequence: Synthetic polypeptide"
MALPVTALLLPLALLLHAARPEVVLTQSPATLSLSPGERATLSCRASKSISKDLAWYQQKPGQAPRLLIYSGSTLQSGIPARFSGSGSGTDFTLTISSLEPEDFAVYYCQQHNKYPYTFGGGTKVEIKGGGGSGGGGSGGGGSGGGGSQVQLVQSGSELKKPGASVKVSCKASGYTFTSYWMNWVRQAPGQGLEWMGRIDPYDSETHYNQKFKDRFVFSVDKSVSTAYLQISSLKAEDTAVYYCARGNWDDYWGQGTTVTVSSTTTPAPRPPTPAPTIASQPLSLRPEACRPAAGGAVHTRGLDFACDIYIWAPLAGTCGVLLLSLVITLYCKRGRKKLLYIFKQPFMRPVQTTQEEDGCSCRFPEEEEGGCELRVKFSRSADAPAYKQGQNQLYNELNLGRREEYDVLDKRRGRDPEMGGKPRRKNPQEGLYNELQKDKMAEAYSEIGMKGERRRGKGHDGLYQGLSTATKDTYDALHMQALPPR

SEQ ID NO: 2493 - protein, 263 aa, Artificial Sequence
  source: /note="Description of Artificial Sequence: Synthetic polypeptide"
MALPVTALLLPLALLLHAARPEVVLTQSPATLSLSPGERATLSCRASKSISKDLAWYQQKPGQAPRLLIYSGSTLQSGIPARFSGSGSGTDFTLTISSLEPEDFAVYYCQQHNKYPYTFGGGTKVEIKGGGGSGGGGSGGGGSGGGGSQVQLVQSGSELKKPGASVKVSCKASGYTFTSYWMNWVRQAPGQGLEWMGRIDPYDSETHYNQKFKDRFVFSVDKSVSTAYLQISSLKAEDTAVYYCARGNWDDYWGQGTTVTVSS

SEQ ID NO: 2494 - DNA, 1458 bp, Artificial Sequence
  source: /note="Description of Artificial Sequence: Synthetic polynucleotide"
atggccctccctgtcaccgccctgctgcttccgctggctcttctgctccacgccgctcggcccgacgtcgtgatgacccagtcaccggcattcctgtccgtgactcccggagaaaaggtcacgattacttgccgggcgtccaagagcatctccaaggacctcgcctggtaccaacagaagccggaccaggcccctaagctgttgatctactcggggtccacccttcaatcgggagtgccatcgcggtttagcggttcgggttctgggaccgacttcactttcaccatctcctcactggaagccgaggatgccgccacttactactgtcagcagcacaacaagtatccgtacaccttcggaggcggtaccaaagtggagatcaaggggggtggcggtagcggaggagggggctccggcggcggcggctcagggggcggaggaagccaagtgcagctggtgcagtcaggcagcgaactgaagaagcccggagcctccgtcaaagtgtcctgcaaagcctcgggatacaccttcacctcctactggatgaactgggtccgccaggcacctggacaggggctggagtggatgggaaggatcgatccctacgattccgaaacccattacaatcagaagttcaaggaccggtttgtgttctccgtggacaagtccgtgtccaccgcctacctccaaattagcagcctgaaggcggaggatacagctgtctactactgcgctcgcggaaactgggatgactattggggccagggaactaccgtgactgtgtcctccaccactaccccagcaccgaggccacccaccccggctcctaccatcgcctcccagcctctgtccctgcgtccggaggcatgtagacccgcagctggtggggccgtgcatacccggggtcttgacttcgcctgcgatatctacatttgggcccctctggctggtacttgcggggtcctgctgctttcactcgtgatcactctttactgtaagcgcggtcggaagaagctgctgtacatctttaagcaacccttcatgaggcctgtgcagactactcaagaggaggacggctgttcatgccggttcccagaggaggaggaaggcggctgcgaactgcgcgtgaaattcagccgcagcgcagatgctccagcctacaagcaggggcagaaccagctctacaacgaactcaatcttggtcggagagaggagtacgacgtgctggacaagcggagaggacgggacccagaaatgggcgggaagccgcgcagaaagaatccccaagagggcctgtacaacgagctccaaaaggataagatggcagaagcctatagcgagattggtatgaaaggggaacgcagaagaggcaaaggccacgacggactgtaccagggactcagcaccgccaccaaggacacctatgacgctcttcacatgcaggccctgccgcctcgg

SEQ ID NO: 2495 - protein, 486 aa, Artificial Sequence
  source: /note="Description of Artificial Sequence: Synthetic polypeptide"
MALPVTALLLPLALLLHAARPDVVMTQSPAFLSVTPGEKVTITCRASKSISKDLAWYQQKPDQAPKLLIYSGSTLQSGVPSRFSGSGSGTDFTFTISSLEAEDAATYYCQQHNKYPYTFGGGTKVEIKGGGGSGGGGSGGGGSGGGGSQVQLVQSGSELKKPGASVKVSCKASGYTFTSYWMNWVRQAPGQGLEWMGRIDPYDSETHYNQKFKDRFVFSVDKSVSTAYLQISSLKAEDTAVYYCARGNWDDYWGQGTTVTVSSTTTPAPRPPTPAPTIASQPLSLRPEACRPAAGGAVHTRGLDFACDIYIWAPLAGTCGVLLLSLVITLYCKRGRKKLLYIFKQPFMRPVQTTQEEDGCSCRFPEEEEGGCELRVKFSRSADAPAYKQGQNQLYNELNLGRREEYDVLDKRRGRDPEMGGKPRRKNPQEGLYNELQKDKMAEAYSEIGMKGERRRGKGHDGLYQGLSTATKDTYDALHMQALPPR

SEQ ID NO: 2496 - protein, 263 aa, Artificial Sequence
  source: /note="Description of Artificial Sequence: Synthetic polypeptide"
MALPVTALLLPLALLLHAARPDVVMTQSPAFLSVTPGEKVTITCRASKSISKDLAWYQQKPDQAPKLLIYSGSTLQSGVPSRFSGSGSGTDFTFTISSLEAEDAATYYCQQHNKYPYTFGGGTKVEIKGGGGSGGGGSGGGGSGGGGSQVQLVQSGSELKKPGASVKVSCKASGYTFTSYWMNWVRQAPGQGLEWMGRIDPYDSETHYNQKFKDRFVFSVDKSVSTAYLQISSLKAEDTAVYYCARGNWDDYWGQGTTVTVSS

SEQ ID NO: 2497 - DNA, 1458 bp, Artificial Sequence
  source: /note="Description of Artificial Sequence: Synthetic polynucleotide"
atggccctccctgtcaccgccctgctgcttccgctggctcttctgctccacgccgctcggcccgacgtggtcatgactcagtccccggactcactcgcggtgtcgcttggagagagagcgaccatcaactgtcgggcctcaaagagcatcagcaaggacctggcctggtaccagcagaagccgggacagccgccaaagctgctgatctactccgggtccaccttgcaatctggtgtccctgaccggttctccggttccgggtcgggtaccgacttcacgctcactatttcgtcgctgcaagccgaagatgtggccgtgtactattgccaacagcacaacaagtacccctacacttttggcggaggcaccaaggtggaaatcaaggggggtggcggtagcggaggagggggctccggcggcggcggctcagggggcggaggaagccaagtgcagctggtgcagtcaggcagcgaactgaagaagcccggagcctccgtcaaagtgtcctgcaaagcctcgggatacaccttcacctcctactggatgaactgggtccgccaggcacctggacaggggctggagtggatgggaaggatcgatccctacgattccgaaacccattacaatcagaagttcaaggaccggtttgtgttctccgtggacaagtccgtgtccaccgcctacctccaaattagcagcctgaaggcggaggatacagctgtctactactgcgctcgcggaaactgggatgactattggggccagggaactaccgtgactgtgtcctccaccactaccccagcaccgaggccacccaccccggctcctaccatcgcctcccagcctctgtccctgcgtccggaggcatgtagacccgcagctggtggggccgtgcatacccggggtcttgacttcgcctgcgatatctacatttgggcccctctggctggtacttgcggggtcctgctgctttcactcgtgatcactctttactgtaagcgcggtcggaagaagctgctgtacatctttaagcaacccttcatgaggcctgtgcagactactcaagaggaggacggctgttcatgccggttcccagaggaggaggaaggcggctgcgaactgcgcgtgaaattcagccgcagcgcagatgctccagcctacaagcaggggcagaaccagctctacaacgaactcaatcttggtcggagagaggagtacgacgtgctggacaagcggagaggacgggacccagaaatgggcgggaagccgcgcagaaagaatccccaagagggcctgtacaacgagctccaaaaggataagatggcagaagcctatagcgagattggtatgaaaggggaacgcagaagaggcaaaggccacgacggactgtaccagggactcagcaccgccaccaaggacacctatgacgctcttcacatgcaggccctgccgcctcgg

SEQ ID NO: 2498 - protein, 486 aa, Artificial Sequence
  source: /note="Description of Artificial Sequence: Synthetic polypeptide"
MALPVTALLLPLALLLHAARPDVVMTQSPDSLAVSLGERATINCRASKSISKDLAWYQQKPGQPPKLLIYSGSTLQSGVPDRFSGSGSGTDFTLTISSLQAEDVAVYYCQQHNKYPYTFGGGTKVEIKGGGGSGGGGSGGGGSGGGGSQVQLVQSGSELKKPGASVKVSCKASGYTFTSYWMNWVRQAPGQGLEWMGRIDPYDSETHYNQKFKDRFVFSVDKSVSTAYLQISSLKAEDTAVYYCARGNWDDYWGQGTTVTVSSTTTPAPRPPTPAPTIASQPLSLRPEACRPAAGGAVHTRGLDFACDIYIWAPLAGTCGVLLLSLVITLYCKRGRKKLLYIFKQPFMRPVQTTQEEDGCSCRFPEEEEGGCELRVKFSRSADAPAYKQGQNQLYNELNLGRREEYDVLDKRRGRDPEMGGKPRRKNPQEGLYNELQKDKMAEAYSEIGMKGERRRGKGHDGLYQGLSTATKDTYDALHMQALPPR

SEQ ID NO: 2499 - protein, 263 aa, Artificial Sequence
  source: /note="Description of Artificial Sequence: Synthetic polypeptide"
MALPVTALLLPLALLLHAARPDVVMTQSPDSLAVSLGERATINCRASKSISKDLAWYQQKPGQPPKLLIYSGSTLQSGVPDRFSGSGSGTDFTLTISSLQAEDVAVYYCQQHNKYPYTFGGGTKVEIKGGGGSGGGGSGGGGSGGGGSQVQLVQSGSELKKPGASVKVSCKASGYTFTSYWMNWVRQAPGQGLEWMGRIDPYDSETHYNQKFKDRFVFSVDKSVSTAYLQISSLKAEDTAVYYCARGNWDDYWGQGTTVTVSS

SEQ ID NO: 2500 - DNA, 1458 bp, Artificial Sequence
  source: /note="Description of Artificial Sequence: Synthetic polynucleotide"
atggccctccctgtcaccgccctgctgcttccgctggctcttctgctccacgccgctcggcccgaggtgcagctggtgcagagcggagccgaggtcaagaagcctggagaatccctgaggatcagctgcaaaggcagcgggtataccttcacctcctactggatgaattgggtccgccagatgcccggaaaaggcctggagtggatgggacggattgacccctacgactcggaaacccattacaaccagaagttcaaggatcacgtgaccatctccgtggacaagtccatttccactgcgtacctccagtggtcaagcctgaaggcctccgacactgctatgtactactgcgcacgcggaaactgggatgattactggggacagggaacaaccgtgactgtgtcctccgggggtggcggtagcggaggagggggctccggcggcggcggctcagggggcggaggaagcgacgtgcagctcacccagtcgccctcatttctgtcggcctcagtgggagacagagtgaccattacttgtcgggcctccaagagcatctccaaggacctggcctggtatcagcagaagccaggaaaggcgcctaagttgctcatctactcggggtcgaccctgcaatctggcgtgccgtcccggttctccggttcgggaagcggtaccgaattcacccttactatctcctccctgcaaccggaggacttcgccacctactactgccaacagcacaacaagtacccgtacactttcgggggtggcacgaaggtcgaaatcaagaccactaccccagcaccgaggccacccaccccggctcctaccatcgcctcccagcctctgtccctgcgtccggaggcatgtagacccgcagctggtggggccgtgcatacccggggtcttgacttcgcctgcgatatctacatttgggcccctctggctggtacttgcggggtcctgctgctttcactcgtgatcactctttactgtaagcgcggtcggaagaagctgctgtacatctttaagcaacccttcatgaggcctgtgcagactactcaagaggaggacggctgttcatgccggttcccagaggaggaggaaggcggctgcgaactgcgcgtgaaattcagccgcagcgcagatgctccagcctacaagcaggggcagaaccagctctacaacgaactcaatcttggtcggagagaggagtacgacgtgctggacaagcggagaggacgggacccagaaatgggcgggaagccgcgcagaaagaatccccaagagggcctgtacaacgagctccaaaaggataagatggcagaagcctatagcgagattggtatgaaaggggaacgcagaagaggcaaaggccacgacggactgtaccagggactcagcaccgccaccaaggacacctatgacgctcttcacatgcaggccctgccgcctcgg

SEQ ID NO: 2501 - protein, 486 aa, Artificial Sequence
  source: /note="Description of Artificial Sequence: Synthetic polypeptide"
MALPVTALLLPLALLLHAARPEVQLVQSGAEVKKPGESLRISCKGSGYTFTSYWMNWVRQMPGKGLEWMGRIDPYDSETHYNQKFKDHVTISVDKSISTAYLQWSSLKASDTAMYYCARGNWDDYWGQGTTVTVSSGGGGSGGGGSGGGGSGGGGSDVQLTQSPSFLSASVGDRVTITCRASKSISKDLAWYQQKPGKAPKLLIYSGSTLQSGVPSRFSGSGSGTEFTLTISSLQPEDFATYYCQQHNKYPYTFGGGTKVEIKTTTPAPRPPTPAPTIASQPLSLRPEACRPAAGGAVHTRGLDFACDIYIWAPLAGTCGVLLLSLVITLYCKRGRKKLLYIFKQPFMRPVQTTQEEDGCSCRFPEEEEGGCELRVKFSRSADAPAYKQGQNQLYNELNLGRREEYDVLDKRRGRDPEMGGKPRRKNPQEGLYNELQKDKMAEAYSEIGMKGERRRGKGHDGLYQGLSTATKDTYDALHMQALPPR

SEQ ID NO: 2502 - protein, 263 aa, Artificial Sequence
  source: /note="Description of Artificial Sequence: Synthetic polypeptide"
MALPVTALLLPLALLLHAARPEVQLVQSGAEVKKPGESLRISCKGSGYTFTSYWMNWVRQMPGKGLEWMGRIDPYDSETHYNQKFKDHVTISVDKSISTAYLQWSSLKASDTAMYYCARGNWDDYWGQGTTVTVSSGGGGSGGGGSGGGGSGGGGSDVQLTQSPSFLSASVGDRVTITCRASKSISKDLAWYQQKPGKAPKLLIYSGSTLQSGVPSRFSGSGSGTEFTLTISSLQPEDFATYYCQQHNKYPYTFGGGTKVEIK

SEQ ID NO: 2503 - protein, 115 aa, Artificial Sequence
  source: /note="Description of Artificial Sequence: Synthetic polypeptide"
EVQLVQSGAEVKKPGESLRISCKGSGYTFTSYWMNWVRQMPGKGLEWMGRIDPYDSETHYNQKFKDHVTISVDKSISTAYLQWSSLKASDTAMYYCARGNWDDYWGQGTTVTVSS

SEQ ID NO: 2504 - DNA, 1458 bp, Artificial Sequence
  source: /note="Description of Artificial Sequence: Synthetic polynucleotide"
atggccctccctgtcaccgccctgctgcttccgctggctcttctgctccacgccgctcggcccgaggtgcagctggtgcagagcggagccgaggtcaagaagcctggagaatccctgaggatcagctgcaaaggcagcgggtataccttcacctcctactggatgaattgggtccgccagatgcccggaaaaggcctggagtggatgggacggattgacccctacgactcggaaacccattacaaccagaagttcaaggatcacgtgaccatctccgtggacaagtccatttccactgcgtacctccagtggtcaagcctgaaggcctccgacactgctatgtactactgcgcacgcggaaactgggatgattactggggacagggaacaaccgtgactgtgtcctccgggggtggcggtagcggaggagggggctccggcggcggcggctcagggggcggaggaagcgaagtggtgctgacccagtcgcccgcaaccctctctctgtcgccgggagaacgcgccactctttcctgtcgggcgtccaagagcatctcaaaggacctcgcctggtaccagcagaagcctggtcaagccccgcggctgctgatctactccggctccacgctgcaatcaggaatcccagccagattttccggttcggggtcggggactgacttcaccttgaccattagctcgctggaacctgaggacttcgccgtgtattactgccagcagcacaacaagtacccgtacaccttcggaggcggtactaaggtcgagatcaagaccactaccccagcaccgaggccacccaccccggctcctaccatcgcctcccagcctctgtccctgcgtccggaggcatgtagacccgcagctggtggggccgtgcatacccggggtcttgacttcgcctgcgatatctacatttgggcccctctggctggtacttgcggggtcctgctgctttcactcgtgatcactctttactgtaagcgcggtcggaagaagctgctgtacatctttaagcaacccttcatgaggcctgtgcagactactcaagaggaggacggctgttcatgccggttcccagaggaggaggaaggcggctgcgaactgcgcgtgaaattcagccgcagcgcagatgctccagcctacaagcaggggcagaaccagctctacaacgaactcaatcttggtcggagagaggagtacgacgtgctggacaagcggagaggacgggacccagaaatgggcgggaagccgcgcagaaagaatccccaagagggcctgtacaacgagctccaaaaggataagatggcagaagcctatagcgagattggtatgaaaggggaacgcagaagaggcaaaggccacgacggactgtaccagggactcagcaccgccaccaaggacacctatgacgctcttcacatgcaggccctgccgcctcgg

SEQ ID NO: 2505 - protein, 486 aa, Artificial Sequence
  source: /note="Description of Artificial Sequence: Synthetic polypeptide"
MALPVTALLLPLALLLHAARPEVQLVQSGAEVKKPGESLRISCKGSGYTFTSYWMNWVRQMPGKGLEWMGRIDPYDSETHYNQKFKDHVTISVDKSISTAYLQWSSLKASDTAMYYCARGNWDDYWGQGTTVTVSSGGGGSGGGGSGGGGSGGGGSEVVLTQSPATLSLSPGERATLSCRASKSISKDLAWYQQKPGQAPRLLIYSGSTLQSGIPARFSGSGSGTDFTLTISSLEPEDFAVYYCQQHNKYPYTFGGGTKVEIKTTTPAPRPPTPAPTIASQPLSLRPEACRPAAGGAVHTRGLDFACDIYIWAPLAGTCGVLLLSLVITLYCKRGRKKLLYIFKQPFMRPVQTTQEEDGCSCRFPEEEEGGCELRVKFSRSADAPAYKQGQNQLYNELNLGRREEYDVLDKRRGRDPEMGGKPRRKNPQEGLYNELQKDKMAEAYSEIGMKGERRRGKGHDGLYQGLSTATKDTYDALHMQALPPR

SEQ ID NO: 2506 - protein, 263 aa, Artificial Sequence
  source: /note="Description of Artificial Sequence: Synthetic polypeptide"
MALPVTALLLPLALLLHAARPEVQLVQSGAEVKKPGESLRISCKGSGYTFTSYWMNWVRQMPGKGLEWMGRIDPYDSETHYNQKFKDHVTISVDKSISTAYLQWSSLKASDTAMYYCARGNWDDYWGQGTTVTVSSGGGGSGGGGSGGGGSGGGGSEVVLTQSPATLSLSPGERATLSCRASKSISKDLAWYQQKPGQAPRLLIYSGSTLQSGIPARFSGSGSGTDFTLTISSLEPEDFAVYYCQQHNKYPYTFGGGTKVEIK

SEQ ID NO: 2507 - DNA, 1458 bp, Artificial Sequence
  source: /note="Description of Artificial Sequence: Synthetic polynucleotide"
atggccctccctgtcaccgccctgctgcttccgctggctcttctgctccacgccgctcggcccgaggtgcagctggtgcagagcggagccgaggtcaagaagcctggagaatccctgaggatcagctgcaaaggcagcgggtataccttcacctcctactggatgaattgggtccgccagatgcccggaaaaggcctggagtggatgggacggattgacccctacgactcggaaacccattacaaccagaagttcaaggatcacgtgaccatctccgtggacaagtccatttccactgcgtacctccagtggtcaagcctgaaggcctccgacactgctatgtactactgcgcacgcggaaactgggatgattactggggacagggaacaaccgtgactgtgtcctccgggggtggcggtagcggaggagggggctccggcggcggcggctcagggggcggaggaagcgacgtcgtgatgacccagtcaccggcattcctgtccgtgactcccggagaaaaggtcacgattacttgccgggcgtccaagagcatctccaaggacctcgcctggtaccaacagaagccggaccaggcccctaagctgttgatctactcggggtccacccttcaatcgggagtgccatcgcggtttagcggttcgggttctgggaccgacttcactttcaccatctcctcactggaagccgaggatgccgccacttactactgtcagcagcacaacaagtatccgtacaccttcggaggcggtaccaaagtggagatcaagaccactaccccagcaccgaggccacccaccccggctcctaccatcgcctcccagcctctgtccctgcgtccggaggcatgtagacccgcagctggtggggccgtgcatacccggggtcttgacttcgcctgcgatatctacatttgggcccctctggctggtacttgcggggtcctgctgctttcactcgtgatcactctttactgtaagcgcggtcggaagaagctgctgtacatctttaagcaacccttcatgaggcctgtgcagactactcaagaggaggacggctgttcatgccggttcccagaggaggaggaaggcggctgcgaactgcgcgtgaaattcagccgcagcgcagatgctccagcctacaagcaggggcagaaccagctctacaacgaactcaatcttggtcggagagaggagtacgacgtgctggacaagcggagaggacgggacccagaaatgggcgggaagccgcgcagaaagaatccccaagagggcctgtacaacgagctccaaaaggataagatggcagaagcctatagcgagattggtatgaaaggggaacgcagaagaggcaaaggccacgacggactgtaccagggactcagcaccgccaccaaggacacctatgacgctcttcacatgcaggccctgccgcctcgg

SEQ ID NO: 2508 - protein, 486 aa, Artificial Sequence
  source: /note="Description of Artificial Sequence: Synthetic polypeptide"
MALPVTALLLPLALLLHAARPEVQLVQSGAEVKKPGESLRISCKGSGYTFTSYWMNWVRQMPGKGLEWMGRIDPYDSETHYNQKFKDHVTISVDKSISTAYLQWSSLKASDTAMYYCARGNWDDYWGQGTTVTVSSGGGGSGGGGSGGGGSGGGGSDVVMTQSPAFLSVTPGEKVTITCRASKSISKDLAWYQQKPDQAPKLLIYSGSTLQSGVPSRFSGSGSGTDFTFTISSLEAEDAATYYCQQHNKYPYTFGGGTKVEIKTTTPAPRPPTPAPTIASQPLSLRPEACRPAAGGAVHTRGLDFACDIYIWAPLAGTCGVLLLSLVITLYCKRGRKKLLYIFKQPFMRPVQTTQEEDGCSCRFPEEEEGGCELRVKFSRSADAPAYKQGQNQLYNELNLGRREEYDVLDKRRGRDPEMGGKPRRKNPQEGLYNELQKDKMAEAYSEIGMKGERRRGKGHDGLYQGLSTATKDTYDALHMQALPPR

SEQ ID NO: 2509 - protein, 263 aa, Artificial Sequence
  source: /note="Description of Artificial Sequence: Synthetic polypeptide"
MALPVTALLLPLALLLHAARPEVQLVQSGAEVKKPGESLRISCKGSGYTFTSYWMNWVRQMPGKGLEWMGRIDPYDSETHYNQKFKDHVTISVDKSISTAYLQWSSLKASDTAMYYCARGNWDDYWGQGTTVTVSSGGGGSGGGGSGGGGSGGGGSDVVMTQSPAFLSVTPGEKVTITCRASKSISKDLAWYQQKPDQAPKLLIYSGSTLQSGVPSRFSGSGSGTDFTFTISSLEAEDAATYYCQQHNKYPYTFGGGTKVEIK

SEQ ID NO: 2510 - DNA, 1458 bp, Artificial Sequence
  source: /note="Description of Artificial Sequence: Synthetic polynucleotide"
atggccctccctgtcaccgccctgctgcttccgctggctcttctgctccacgccgctcggcccgaggtgcagctggtgcagagcggagccgaggtcaagaagcctggagaatccctgaggatcagctgcaaaggcagcgggtataccttcacctcctactggatgaattgggtccgccagatgcccggaaaaggcctggagtggatgggacggattgacccctacgactcggaaacccattacaaccagaagttcaaggatcacgtgaccatctccgtggacaagtccatttccactgcgtacctccagtggtcaagcctgaaggcctccgacactgctatgtactactgcgcacgcggaaactgggatgattactggggacagggaacaaccgtgactgtgtcctccgggggtggcggtagcggaggagggggctccggcggcggcggctcagggggcggaggaagcgacgtggtcatgactcagtccccggactcactcgcggtgtcgcttggagagagagcgaccatcaactgtcgggcctcaaagagcatcagcaaggacctggcctggtaccagcagaagccgggacagccgccaaagctgctgatctactccgggtccaccttgcaatctggtgtccctgaccggttctccggttccgggtcgggtaccgacttcacgctcactatttcgtcgctgcaagccgaagatgtggccgtgtactattgccaacagcacaacaagtacccctacacttttggcggaggcaccaaggtggaaatcaagaccactaccccagcaccgaggccacccaccccggctcctaccatcgcctcccagcctctgtccctgcgtccggaggcatgtagacccgcagctggtggggccgtgcatacccggggtcttgacttcgcctgcgatatctacatttgggcccctctggctggtacttgcggggtcctgctgctttcactcgtgatcactctttactgtaagcgcggtcggaagaagctgctgtacatctttaagcaacccttcatgaggcctgtgcagactactcaagaggaggacggctgttcatgccggttcccagaggaggaggaaggcggctgcgaactgcgcgtgaaattcagccgcagcgcagatgctccagcctacaagcaggggcagaaccagctctacaacgaactcaatcttggtcggagagaggagtacgacgtgctggacaagcggagaggacgggacccagaaatgggcgggaagccgcgcagaaagaatccccaagagggcctgtacaacgagctccaaaaggataagatggcagaagcctatagcgagattggtatgaaaggggaacgcagaagaggcaaaggccacgacggactgtaccagggactcagcaccgccaccaaggacacctatgacgctcttcacatgcaggccctgccgcctcgg

SEQ ID NO: 2511 - protein, 486 aa, Artificial Sequence
  source: /note="Description of Artificial Sequence: Synthetic polypeptide"
MALPVTALLLPLALLLHAARPEVQLVQSGAEVKKPGESLRISCKGSGYTFTSYWMNWVRQMPGKGLEWMGRIDPYDSETHYNQKFKDHVTISVDKSISTAYLQWSSLKASDTAMYYCARGNWDDYWGQGTTVTVSSGGGGSGGGGSGGGGSGGGGSDVVMTQSPDSLAVSLGERATINCRASKSISKDLAWYQQKPGQPPKLLIYSGSTLQSGVPDRFSGSGSGTDFTLTISSLQAEDVAVYYCQQHNKYPYTFGGGTKVEIKTTTPAPRPPTPAPTIASQPLSLRPEACRPAAGGAVHTRGLDFACDIYIWAPLAGTCGVLLLSLVITLYCKRGRKKLLYIFKQPFMRPVQTTQEEDGCSCRFPEEEEGGCELRVKFSRSADAPAYKQGQNQLYNELNLGRREEYDVLDKRRGRDPEMGGKPRRKNPQEGLYNELQKDKMAEAYSEIGMKGERRRGKGHDGLYQGLSTATKDTYDALHMQALPPR

SEQ ID NO: 2512 - protein, 263 aa, Artificial Sequence
  source: /note="Description of Artificial Sequence: Synthetic polypeptide"
MALPVTALLLPLALLLHAARPEVQLVQSGAEVKKPGESLRISCKGSGYTFTSYWMNWVRQMPGKGLEWMGRIDPYDSETHYNQKFKDHVTISVDKSISTAYLQWSSLKASDTAMYYCARGNWDDYWGQGTTVTVSSGGGGSGGGGSGGGGSGGGGSDVVMTQSPDSLAVSLGERATINCRASKSISKDLAWYQQKPGQPPKLLIYSGSTLQSGVPDRFSGSGSGTDFTLTISSLQAEDVAVYYCQQHNKYPYTFGGGTKVEIK

SEQ ID NO: 2513 - DNA, 1458 bp, Artificial Sequence
  source: /note="Description of Artificial Sequence: Synthetic polynucleotide"
atggccctccctgtcaccgccctgctgcttccgctggctcttctgctccacgccgctcggcccgacgtgcagctcacccagtcgccctcatttctgtcggcctcagtgggagacagagtgaccattacttgtcgggcctccaagagcatctccaaggacctggcctggtatcagcagaagccaggaaaggcgcctaagttgctcatctactcggggtcgaccctgcaatctggcgtgccgtcccggttctccggttcgggaagcggtaccgaattcacccttactatctcctccctgcaaccggaggacttcgccacctactactgccaacagcacaacaagtacccgtacactttcgggggtggcacgaaggtcgaaatcaaggggggtggcggtagcggaggagggggctccggcggcggcggctcagggggcggaggaagcgaggtgcagctggtgcagagcggagccgaggtcaagaagcctggagaatccctgaggatcagctgcaaaggcagcgggtataccttcacctcctactggatgaattgggtccgccagatgcccggaaaaggcctggagtggatgggacggattgacccctacgactcggaaacccattacaaccagaagttcaaggatcacgtgaccatctccgtggacaagtccatttccactgcgtacctccagtggtcaagcctgaaggcctccgacactgctatgtactactgcgcacgcggaaactgggatgattactggggacagggaacaaccgtgactgtgtcctccaccactaccccagcaccgaggccacccaccccggctcctaccatcgcctcccagcctctgtccctgcgtccggaggcatgtagacccgcagctggtggggccgtgcatacccggggtcttgacttcgcctgcgatatctacatttgggcccctctggctggtacttgcggggtcctgctgctttcactcgtgatcactctttactgtaagcgcggtcggaagaagctgctgtacatctttaagcaacccttcatgaggcctgtgcagactactcaagaggaggacggctgttcatgccggttcccagaggaggaggaaggcggctgcgaactgcgcgtgaaattcagccgcagcgcagatgctccagcctacaagcaggggcagaaccagctctacaacgaactcaatcttggtcggagagaggagtacgacgtgctggacaagcggagaggacgggacccagaaatgggcgggaagccgcgcagaaagaatccccaagagggcctgtacaacgagctccaaaaggataagatggcagaagcctatagcgagattggtatgaaaggggaacgcagaagaggcaaaggccacgacggactgtaccagggactcagcaccgccaccaaggacacctatgacgctcttcacatgcaggccctgccgcctcgg

SEQ ID NO: 2514 - protein, 486 aa, Artificial Sequence
  source: /note="Description of Artificial Sequence: Synthetic polypeptide"
MALPVTALLLPLALLLHAARPDVQLTQSPSFLSASVGDRVTITCRASKSISKDLAWYQQKPGKAPKLLIYSGSTLQSGVPSRFSGSGSGTEFTLTISSLQPEDFATYYCQQHNKYPYTFGGGTKVEIKGGGGSGGGGSGGGGSGGGGSEVQLVQSGAEVKKPGESLRISCKGSGYTFTSYWMNWVRQMPGKGLEWMGRIDPYDSETHYNQKFKDHVTISVDKSISTAYLQWSSLKASDTAMYYCARGNWDDYWGQGTTVTVSSTTTPAPRPPTPAPTIASQPLSLRPEACRPAAGGAVHTRGLDFACDIYIWAPLAGTCGVLLLSLVITLYCKRGRKKLLYIFKQPFMRPVQTTQEEDGCSCRFPEEEEGGCELRVKFSRSADAPAYKQGQNQLYNELNLGRREEYDVLDKRRGRDPEMGGKPRRKNPQEGLYNELQKDKMAEAYSEIGMKGERRRGKGHDGLYQGLSTATKDTYDALHMQALPPR

SEQ ID NO: 2515 - protein, 263 aa, Artificial Sequence
  source: /note="Description of Artificial Sequence: Synthetic polypeptide"
MALPVTALLLPLALLLHAARPDVQLTQSPSFLSASVGDRVTITCRASKSISKDLAWYQQKPGKAPKLLIYSGSTLQSGVPSRFSGSGSGTEFTLTISSLQPEDFATYYCQQHNKYPYTFGGGTKVEIKGGGGSGGGGSGGGGSGGGGSEVQLVQSGAEVKKPGESLRISCKGSGYTFTSYWMNWVRQMPGKGLEWMGRIDPYDSETHYNQKFKDHVTISVDKSISTAYLQWSSLKASDTAMYYCARGNWDDYWGQGTTVTVSS

SEQ ID NO: 2516 - DNA, 1458 bp, Artificial Sequence
  source: /note="Description of Artificial Sequence: Synthetic polynucleotide"
atggccctccctgtcaccgccctgctgcttccgctggctcttctgctccacgccgctcggcccgaagtggtgctgacccagtcgcccgcaaccctctctctgtcgccgggagaacgcgccactctttcctgtcgggcgtccaagagcatctcaaaggacctcgcctggtaccagcagaagcctggtcaagccccgcggctgctgatctactccggctccacgctgcaatcaggaatcccagccagattttccggttcggggtcggggactgacttcaccttgaccattagctcgctggaacctgaggacttcgccgtgtattactgccagcagcacaacaagtacccgtacaccttcggaggcggtactaaggtcgagatcaaggggggtggcggtagcggaggagggggctccggcggcggcggctcagggggcggaggaagcgaggtgcagctggtgcagagcggagccgaggtcaagaagcctggagaatccctgaggatcagctgcaaaggcagcgggtataccttcacctcctactggatgaattgggtccgccagatgcccggaaaaggcctggagtggatgggacggattgacccctacgactcggaaacccattacaaccagaagttcaaggatcacgtgaccatctccgtggacaagtccatttccactgcgtacctccagtggtcaagcctgaaggcctccgacactgctatgtactactgcgcacgcggaaactgggatgattactggggacagggaacaaccgtgactgtgtcctccaccactaccccagcaccgaggccacccaccccggctcctaccatcgcctcccagcctctgtccctgcgtccggaggcatgtagacccgcagctggtggggccgtgcatacccggggtcttgacttcgcctgcgatatctacatttgggcccctctggctggtacttgcggggtcctgctgctttcactcgtgatcactctttactgtaagcgcggtcggaagaagctgctgtacatctttaagcaacccttcatgaggcctgtgcagactactcaagaggaggacggctgttcatgccggttcccagaggaggaggaaggcggctgcgaactgcgcgtgaaattcagccgcagcgcagatgctccagcctacaagcaggggcagaaccagctctacaacgaactcaatcttggtcggagagaggagtacgacgtgctggacaagcggagaggacgggacccagaaatgggcgggaagccgcgcagaaagaatccccaagagggcctgtacaacgagctccaaaaggataagatggcagaagcctatagcgagattggtatgaaaggggaacgcagaagaggcaaaggccacgacggactgtaccagggactcagcaccgccaccaaggacacctatgacgctcttcacatgcaggccctgccgcctcgg

SEQ ID NO: 2517 - protein, 486 aa, Artificial Sequence
  source: /note="Description of Artificial Sequence: Synthetic polypeptide"
MALPVTALLLPLALLLHAARPEVVLTQSPATLSLSPGERATLSCRASKSISKDLAWYQQKPGQAPRLLIYSGSTLQSGIPARFSGSGSGTDFTLTISSLEPEDFAVYYCQQHNKYPYTFGGGTKVEIKGGGGSGGGGSGGGGSGGGGSEVQLVQSGAEVKKPGESLRISCKGSGYTFTSYWMNWVRQMPGKGLEWMGRIDPYDSETHYNQKFKDHVTISVDKSISTAYLQWSSLKASDTAMYYCARGNWDDYWGQGTTVTVSSTTTPAPRPPTPAPTIASQPLSLRPEACRPAAGGAVHTRGLDFACDIYIWAPLAGTCGVLLLSLVITLYCKRGRKKLLYIFKQPFMRPVQTTQEEDGCSCRFPEEEEGGCELRVKFSRSADAPAYKQGQNQLYNELNLGRREEYDVLDKRRGRDPEMGGKPRRKNPQEGLYNELQKDKMAEAYSEIGMKGERRRGKGHDGLYQGLSTATKDTYDALHMQALPPR

SEQ ID NO: 2518 - protein, 263 aa, Artificial Sequence
  source: /note="Description of Artificial Sequence: Synthetic polypeptide"
MALPVTALLLPLALLLHAARPEVVLTQSPATLSLSPGERATLSCRASKSISKDLAWYQQKPGQAPRLLIYSGSTLQSGIPARFSGSGSGTDFTLTISSLEPEDFAVYYCQQHNKYPYTFGGGTKVEIKGGGGSGGGGSGGGGSGGGGSEVQLVQSGAEVKKPGESLRISCKGSGYTFTSYWMNWVRQMPGKGLEWMGRIDPYDSETHYNQKFKDHVTISVDKSISTAYLQWSSLKASDTAMYYCARGNWDDYWGQGTTVTVSS

SEQ ID NO: 2519 - DNA, 1458 bp, Artificial Sequence
  source: /note="Description of Artificial Sequence: Synthetic polynucleotide"
atggccctccctgtcaccgccctgctgcttccgctggctcttctgctccacgccgctcggcccgacgtcgtgatgacccagtcaccggcattcctgtccgtgactcccggagaaaaggtcacgattacttgccgggcgtccaagagcatctccaaggacctcgcctggtaccaacagaagccggaccaggcccctaagctgttgatctactcggggtccacccttcaatcgggagtgccatcgcggtttagcggttcgggttctgggaccgacttcactttcaccatctcctcactggaagccgaggatgccgccacttactactgtcagcagcacaacaagtatccgtacaccttcggaggcggtaccaaagtggagatcaaggggggtggcggtagcggaggagggggctccggcggcggcggctcagggggcggaggaagcgaggtgcagctggtgcagagcggagccgaggtcaagaagcctggagaatccctgaggatcagctgcaaaggcagcgggtataccttcacctcctactggatgaattgggtccgccagatgcccggaaaaggcctggagtggatgggacggattgacccctacgactcggaaacccattacaaccagaagttcaaggatcacgtgaccatctccgtggacaagtccatttccactgcgtacctccagtggtcaagcctgaaggcctccgacactgctatgtactactgcgcacgcggaaactgggatgattactggggacagggaacaaccgtgactgtgtcctccaccactaccccagcaccgaggccacccaccccggctcctaccatcgcctcccagcctctgtccctgcgtccggaggcatgtagacccgcagctggtggggccgtgcatacccggggtcttgacttcgcctgcgatatctacatttgggcccctctggctggtacttgcggggtcctgctgctttcactcgtgatcactctttactgtaagcgcggtcggaagaagctgctgtacatctttaagcaacccttcatgaggcctgtgcagactactcaagaggaggacggctgttcatgccggttcccagaggaggaggaaggcggctgcgaactgcgcgtgaaattcagccgcagcgcagatgctccagcctacaagcaggggcagaaccagctctacaacgaactcaatcttggtcggagagaggagtacgacgtgctggacaagcggagaggacgggacccagaaatgggcgggaagccgcgcagaaagaatccccaagagggcctgtacaacgagctccaaaaggataagatggcagaagcctatagcgagattggtatgaaaggggaacgcagaagaggcaaaggccacgacggactgtaccagggactcagcaccgccaccaaggacacctatgacgctcttcacatgcaggccctgccgcctcgg

SEQ ID NO: 2520 - protein, 486 aa, Artificial Sequence
  source: /note="Description of Artificial Sequence: Synthetic polypeptide"
MALPVTALLLPLALLLHAARPDVVMTQSPAFLSVTPGEKVTITCRASKSISKDLAWYQQKPDQAPKLLIYSGSTLQSGVPSRFSGSGSGTDFTFTISSLEAEDAATYYCQQHNKYPYTFGGGTKVEIKGGGGSGGGGSGGGGSGGGGSEVQLVQSGAEVKKPGESLRISCKGSGYTFTSYWMNWVRQMPGKGLEWMGRIDPYDSETHYNQKFKDHVTISVDKSISTAYLQWSSLKASDTAMYYCARGNWDDYWGQGTTVTVSSTTTPAPRPPTPAPTIASQPLSLRPEACRPAAGGAVHTRGLDFACDIYIWAPLAGTCGVLLLSLVITLYCKRGRKKLLYIFKQPFMRPVQTTQEEDGCSCRFPEEEEGGCELRVKFSRSADAPAYKQGQNQLYNELNLGRREEYDVLDKRRGRDPEMGGKPRRKNPQEGLYNELQKDKMAEAYSEIGMKGERRRGKGHDGLYQGLSTATKDTYDALHMQALPPR

SEQ ID NO: 2521 - protein, 263 aa, Artificial Sequence
  source: /note="Description of Artificial Sequence: Synthetic polypeptide"
MALPVTALLLPLALLLHAARPDVVMTQSPAFLSVTPGEKVTITCRASKSISKDLAWYQQKPDQAPKLLIYSGSTLQSGVPSRFSGSGSGTDFTFTISSLEAEDAATYYCQQHNKYPYTFGGGTKVEIKGGGGSGGGGSGGGGSGGGGSEVQLVQSGAEVKKPGESLRISCKGSGYTFTSYWMNWVRQMPGKGLEWMGRIDPYDSETHYNQKFKDHVTISVDKSISTAYLQWSSLKASDTAMYYCARGNWDDYWGQGTTVTVSS

SEQ ID NO: 2522 - DNA, 1458 bp, Artificial Sequence
  source: /note="Description of Artificial Sequence: Synthetic polynucleotide"
atggccctccctgtcaccgccctgctgcttccgctggctcttctgctccacgccgctcggcccgacgtggtcatgactcagtccccggactcactcgcggtgtcgcttggagagagagcgaccatcaactgtcgggcctcaaagagcatcagcaaggacctggcctggtaccagcagaagccgggacagccgccaaagctgctgatctactccgggtccaccttgcaatctggtgtccctgaccggttctccggttccgggtcgggtaccgacttcacgctcactatttcgtcgctgcaagccgaagatgtggccgtgtactattgccaacagcacaacaagtacccctacacttttggcggaggcaccaaggtggaaatcaaggggggtggcggtagcggaggagggggctccggcggcggcggctcagggggcggaggaagcgaggtgcagctggtgcagagcggagccgaggtcaagaagcctggagaatccctgaggatcagctgcaaaggcagcgggtataccttcacctcctactggatgaattgggtccgccagatgcccggaaaaggcctggagtggatgggacggattgacccctacgactcggaaacccattacaaccagaagttcaaggatcacgtgaccatctccgtggacaagtccatttccactgcgtacctccagtggtcaagcctgaaggcctccgacactgctatgtactactgcgcacgcggaaactgggatgattactggggacagggaacaaccgtgactgtgtcctccaccactaccccagcaccgaggccacccaccccggctcctaccatcgcctcccagcctctgtccctgcgtccggaggcatgtagacccgcagctggtggggccgtgcatacccggggtcttgacttcgcctgcgatatctacatttgggcccctctggctggtacttgcggggtcctgctgctttcactcgtgatcactctttactgtaagcgcggtcggaagaagctgctgtacatctttaagcaacccttcatgaggcctgtgcagactactcaagaggaggacggctgttcatgccggttcccagaggaggaggaaggcggctgcgaactgcgcgtgaaattcagccgcagcgcagatgctccagcctacaagcaggggcagaaccagctctacaacgaactcaatcttggtcggagagaggagtacgacgtgctggacaagcggagaggacgggacccagaaatgggcgggaagccgcgcagaaagaatccccaagagggcctgtacaacgagctccaaaaggataagatggcagaagcctatagcgagattggtatgaaaggggaacgcagaagaggcaaaggccacgacggactgtaccagggactcagcaccgccaccaaggacacctatgacgctcttcacatgcaggccctgccgcctcgg

SEQ ID NO: 2523 - protein, 486 aa, Artificial Sequence
  source: /note="Description of Artificial Sequence: Synthetic polypeptide"
MALPVTALLLPLALLLHAARPDVVMTQSPDSLAVSLGERATINCRASKSISKDLAWYQQKPGQPPKLLIYSGSTLQSGVPDRFSGSGSGTDFTLTISSLQAEDVAVYYCQQHNKYPYTFGGGTKVEIKGGGGSGGGGSGGGGSGGGGSEVQLVQSGAEVKKPGESLRISCKGSGYTFTSYWMNWVRQMPGKGLEWMGRIDPYDSETHYNQKFKDHVTISVDKSISTAYLQWSSLKASDTAMYYCARGNWDDYWGQGTTVTVSSTTTPAPRPPTPAPTIASQPLSLRPEACRPAAGGAVHTRGLDFACDIYIWAPLAGTCGVLLLSLVITLYCKRGRKKLLYIFKQPFMRPVQTTQEEDGCSCRFPEEEEGGCELRVKFSRSADAPAYKQGQNQLYNELNLGRREEYDVLDKRRGRDPEMGGKPRRKNPQEGLYNELQKDKMAEAYSEIGMKGERRRGKGHDGLYQGLSTATKDTYDALHMQALPPR

SEQ ID NO: 2524 - protein, 263 aa, Artificial Sequence
  source: /note="Description of Artificial Sequence: Synthetic polypeptide"
MALPVTALLLPLALLLHAARPDVVMTQSPDSLAVSLGERATINCRASKSISKDLAWYQQKPGQPPKLLIYSGSTLQSGVPDRFSGSGSGTDFTLTISSLQAEDVAVYYCQQHNKYPYTFGGGTKVEIKGGGGSGGGGSGGGGSGGGGSEVQLVQSGAEVKKPGESLRISCKGSGYTFTSYWMNWVRQMPGKGLEWMGRIDPYDSETHYNQKFKDHVTISVDKSISTAYLQWSSLKASDTAMYYCARGNWDDYWGQGTTVTVSS

SEQ ID NO: 2525 - DNA, 1458 bp, Artificial Sequence
  source: /note="Description of Artificial Sequence: Synthetic polynucleotide"
atggccctccctgtcaccgccctgctgcttccgctggctcttctgctccacgccgctcggcccgaagtgcagctcgtcgagagcggagggggactggtgcagcccggaggaagcctgaggctgtcctgcgctgcctccggctacaccttcacctcctactggatgaactgggtcagacaggcacctggaaagggactggtctgggtgtcgcgcattgacccctacgactccgaaacccattacaatcagaaattcaaggaccgcttcaccatctccgtggacaaagccaagagcaccgcgtacctccaaatgaactccctgcgcgctgaggatacagcagtgtactattgcgcccggggaaactgggatgattactggggccagggaactactgtgactgtgtcatccgggggtggcggtagcggaggagggggctccggcggcggcggctcagggggcggaggaagcgacgtgcagctcacccagtcgccctcatttctgtcggcctcagtgggagacagagtgaccattacttgtcgggcctccaagagcatctccaaggacctggcctggtatcagcagaagccaggaaaggcgcctaagttgctcatctactcggggtcgaccctgcaatctggcgtgccgtcccggttctccggttcgggaagcggtaccgaattcacccttactatctcctccctgcaaccggaggacttcgccacctactactgccaacagcacaacaagtacccgtacactttcgggggtggcacgaaggtcgaaatcaagaccactaccccagcaccgaggccacccaccccggctcctaccatcgcctcccagcctctgtccctgcgtccggaggcatgtagacccgcagctggtggggccgtgcatacccggggtcttgacttcgcctgcgatatctacatttgggcccctctggctggtacttgcggggtcctgctgctttcactcgtgatcactctttactgtaagcgcggtcggaagaagctgctgtacatctttaagcaacccttcatgaggcctgtgcagactactcaagaggaggacggctgttcatgccggttcccagaggaggaggaaggcggctgcgaactgcgcgtgaaattcagccgcagcgcagatgctccagcctacaagcaggggcagaaccagctctacaacgaactcaatcttggtcggagagaggagtacgacgtgctggacaagcggagaggacgggacccagaaatgggcgggaagccgcgcagaaagaatccccaagagggcctgtacaacgagctccaaaaggataagatggcagaagcctatagcgagattggtatgaaaggggaacgcagaagaggcaaaggccacgacggactgtaccagggactcagcaccgccaccaaggacacctatgacgctcttcacatgcaggccctgccgcctcgg

SEQ ID NO: 2526 - protein, 486 aa, Artificial Sequence
  source: /note="Description of Artificial Sequence: Synthetic polypeptide"
MALPVTALLLPLALLLHAARPEVQLVESGGGLVQPGGSLRLSCAASGYTFTSYWMNWVRQAPGKGLVWVSRIDPYDSETHYNQKFKDRFTISVDKAKSTAYLQMNSLRAEDTAVYYCARGNWDDYWGQGTTVTVSSGGGGSGGGGSGGGGSGGGGSDVQLTQSPSFLSASVGDRVTITCRASKSISKDLAWYQQKPGKAPKLLIYSGSTLQSGVPSRFSGSGSGTEFTLTISSLQPEDFATYYCQQHNKYPYTFGGGTKVEIKTTTPAPRPPTPAPTIASQPLSLRPEACRPAAGGAVHTRGLDFACDIYIWAPLAGTCGVLLLSLVITLYCKRGRKKLLYIFKQPFMRPVQTTQEEDGCSCRFPEEEEGGCELRVKFSRSADAPAYKQGQNQLYNELNLGRREEYDVLDKRRGRDPEMGGKPRRKNPQEGLYNELQKDKMAEAYSEIGMKGERRRGKGHDGLYQGLSTATKDTYDALHMQALPPR

SEQ ID NO: 2527 - protein, 263 aa, Artificial Sequence
  source: /note="Description of Artificial Sequence: Synthetic polypeptide"
MALPVTALLLPLALLLHAARPEVQLVESGGGLVQPGGSLRLSCAASGYTFTSYWMNWVRQAPGKGLVWVSRIDPYDSETHYNQKFKDRFTISVDKAKSTAYLQMNSLRAEDTAVYYCARGNWDDYWGQGTTVTVSSGGGGSGGGGSGGGGSGGGGSDVQLTQSPSFLSASVGDRVTITCRASKSISKDLAWYQQKPGKAPKLLIYSGSTLQSGVPSRFSGSGSGTEFTLTISSLQPEDFATYYCQQHNKYPYTFGGGTKVEIK

SEQ ID NO: 2528 - protein, 115 aa, Artificial Sequence
  source: /note="Description of Artificial Sequence: Synthetic polypeptide"
EVQLVESGGGLVQPGGSLRLSCAASGYTFTSYWMNWVRQAPGKGLVWVSRIDPYDSETHYNQKFKDRFTISVDKAKSTAYLQMNSLRAEDTAVYYCARGNWDDYWGQGTTVTVSS

SEQ ID NO: 2529 - DNA, 1458 bp, Artificial Sequence
  source: /note="Description of Artificial Sequence: Synthetic polynucleotide"
atggccctccctgtcaccgccctgctgcttccgctggctcttctgctccacgccgctcggcccgaagtgcagctcgtcgagagcggagggggactggtgcagcccggaggaagcctgaggctgtcctgcgctgcctccggctacaccttcacctcctactggatgaactgggtcagacaggcacctggaaagggactggtctgggtgtcgcgcattgacccctacgactccgaaacccattacaatcagaaattcaaggaccgcttcaccatctccgtggacaaagccaagagcaccgcgtacctccaaatgaactccctgcgcgctgaggatacagcagtgtactattgcgcccggggaaactgggatgattactggggccagggaactactgtgactgtgtcatccgggggtggcggtagcggaggagggggctccggcggcggcggctcagggggcggaggaagcgaagtggtgctgacccagtcgcccgcaaccctctctctgtcgccgggagaacgcgccactctttcctgtcgggcgtccaagagcatctcaaaggacctcgcctggtaccagcagaagcctggtcaagccccgcggctgctgatctactccggctccacgctgcaatcaggaatcccagccagattttccggttcggggtcggggactgacttcaccttgaccattagctcgctggaacctgaggacttcgccgtgtattactgccagcagcacaacaagtacccgtacaccttcggaggcggtactaaggtcgagatcaagaccactaccccagcaccgaggccacccaccccggctcctaccatcgcctcccagcctctgtccctgcgtccggaggcatgtagacccgcagctggtggggccgtgcatacccggggtcttgacttcgcctgcgatatctacatttgggcccctctggctggtacttgcggggtcctgctgctttcactcgtgatcactctttactgtaagcgcggtcggaagaagctgctgtacatctttaagcaacccttcatgaggcctgtgcagactactcaagaggaggacggctgttcatgccggttcccagaggaggaggaaggcggctgcgaactgcgcgtgaaattcagccgcagcgcagatgctccagcctacaagcaggggcagaaccagctctacaacgaactcaatcttggtcggagagaggagtacgacgtgctggacaagcggagaggacgggacccagaaatgggcgggaagccgcgcagaaagaatccccaagagggcctgtacaacgagctccaaaaggataagatggcagaagcctatagcgagattggtatgaaaggggaacgcagaagaggcaaaggccacgacggactgtaccagggactcagcaccgccaccaaggacacctatgacgctcttcacatgcaggccctgccgcctcgg

SEQ ID NO: 2530 - protein, 486 aa, Artificial Sequence
  source: /note="Description of Artificial Sequence: Synthetic polypeptide"
MALPVTALLLPLALLLHAARPEVQLVESGGGLVQPGGSLRLSCAASGYTFTSYWMNWVRQAPGKGLVWVSRIDPYDSETHYNQKFKDRFTISVDKAKSTAYLQMNSLRAEDTAVYYCARGNWDDYWGQGTTVTVSSGGGGSGGGGSGGGGSGGGGSEVVLTQSPATLSLSPGERATLSCRASKSISKDLAWYQQKPGQAPRLLIYSGSTLQSGIPARFSGSGSGTDFTLTISSLEPEDFAVYYCQQHNKYPYTFGGGTKVEIKTTTPAPRPPTPAPTIASQPLSLRPEACRPAAGGAVHTRGLDFACDIYIWAPLAGTCGVLLLSLVITLYCKRGRKKLLYIFKQPFMRPVQTTQEEDGCSCRFPEEEEGGCELRVKFSRSADAPAYKQGQNQLYNELNLGRREEYDVLDKRRGRDPEMGGKPRRKNPQEGLYNELQKDKMAEAYSEIGMKGERRRGKGHDGLYQGLSTATKDTYDALHMQALPPR

SEQ ID NO: 2531 - protein, 263 aa, Artificial Sequence
  source: /note="Description of Artificial Sequence: Synthetic polypeptide"
MALPVTALLLPLALLLHAARPEVQLVESGGGLVQPGGSLRLSCAASGYTFTSYWMNWVRQAPGKGLVWVSRIDPYDSETHYNQKFKDRFTISVDKAKSTAYLQMNSLRAEDTAVYYCARGNWDDYWGQGTTVTVSSGGGGSGGGGSGGGGSGGGGSEVVLTQSPATLSLSPGERATLSCRASKSISKDLAWYQQKPGQAPRLLIYSGSTLQSGIPARFSGSGSGTDFTLTISSLEPEDFAVYYCQQHNKYPYTFGGGTKVEIK

SEQ ID NO: 2532 - DNA, 1458 bp, Artificial Sequence
  source: /note="Description of Artificial Sequence: Synthetic polynucleotide"
atggccctccctgtcaccgccctgctgcttccgctggctcttctgctccacgccgctcggcccgaagtgcagctcgtcgagagcggagggggactggtgcagcccggaggaagcctgaggctgtcctgcgctgcctccggctacaccttcacctcctactggatgaactgggtcagacaggcacctggaaagggactggtctgggtgtcgcgcattgacccctacgactccgaaacccattacaatcagaaattcaaggaccgcttcaccatctccgtggacaaagccaagagcaccgcgtacctccaaatgaactccctgcgcgctgaggatacagcagtgtactattgcgcccggggaaactgggatgattactggggccagggaactactgtgactgtgtcatccgggggtggcggtagcggaggagggggctccggcggcggcggctcagggggcggaggaagcgacgtcgtgatgacccagtcaccggcattcctgtccgtgactcccggagaaaaggtcacgattacttgccgggcgtccaagagcatctccaaggacctcgcctggtaccaacagaagccggaccaggcccctaagctgttgatctactcggggtccacccttcaatcgggagtgccatcgcggtttagcggttcgggttctgggaccgacttcactttcaccatctcctcactggaagccgaggatgccgccacttactactgtcagcagcacaacaagtatccgtacaccttcggaggcggtaccaaagtggagatcaagaccactaccccagcaccgaggccacccaccccggctcctaccatcgcctcccagcctctgtccctgcgtccggaggcatgtagacccgcagctggtggggccgtgcatacccggggtcttgacttcgcctgcgatatctacatttgggcccctctggctggtacttgcggggtcctgctgctttcactcgtgatcactctttactgtaagcgcggtcggaagaagctgctgtacatctttaagcaacccttcatgaggcctgtgcagactactcaagaggaggacggctgttcatgccggttcccagaggaggaggaaggcggctgcgaactgcgcgtgaaattcagccgcagcgcagatgctccagcctacaagcaggggcagaaccagctctacaacgaactcaatcttggtcggagagaggagtacgacgtgctggacaagcggagaggacgggacccagaaatgggcgggaagccgcgcagaaagaatccccaagagggcctgtacaacgagctccaaaaggataagatggcagaagcctatagcgagattggtatgaaaggggaacgcagaagaggcaaaggccacgacggactgtaccagggactcagcaccgccaccaaggacacctatgacgctcttcacatgcaggccctgccgcctcgg

SEQ ID NO: 2533 - protein, 486 aa, Artificial Sequence
  source: /note="Description of Artificial Sequence: Synthetic polypeptide"
MALPVTALLLPLALLLHAARPEVQLVESGGGLVQPGGSLRLSCAASGYTFTSYWMNWVRQAPGKGLVWVSRIDPYDSETHYNQKFKDRFTISVDKAKSTAYLQMNSLRAEDTAVYYCARGNWDDYWGQGTTVTVSSGGGGSGGGGSGGGGSGGGGSDVVMTQSPAFLSVTPGEKVTITCRASKSISKDLAWYQQKPDQAPKLLIYSGSTLQSGVPSRFSGSGSGTDFTFTISSLEAEDAATYYCQQHNKYPYTFGGGTKVEIKTTTPAPRPPTPAPTIASQPLSLRPEACRPAAGGAVHTRGLDFACDIYIWAPLAGTCGVLLLSLVITLYCKRGRKKLLYIFKQPFMRPVQTTQEEDGCSCRFPEEEEGGCELRVKFSRSADAPAYKQGQNQLYNELNLGRREEYDVLDKRRGRDPEMGGKPRRKNPQEGLYNELQKDKMAEAYSEIGMKGERRRGKGHDGLYQGLSTATKDTYDALHMQALPPR

SEQ ID NO: 2534 - protein, 263 aa, Artificial Sequence
  source: /note="Description of Artificial Sequence: Synthetic polypeptide"
MALPVTALLLPLALLLHAARPEVQLVESGGGLVQPGGSLRLSCAASGYTFTSYWMNWVRQAPGKGLVWVSRIDPYDSETHYNQKFKDRFTISVDKAKSTAYLQMNSLRAEDTAVYYCARGNWDDYWGQGTTVTVSSGGGGSGGGGSGGGGSGGGGSDVVMTQSPAFLSVTPGEKVTITCRASKSISKDLAWYQQKPDQAPKLLIYSGSTLQSGVPSRFSGSGSGTDFTFTISSLEAEDAATYYCQQHNKYPYTFGGGTKVEIK

SEQ ID NO: 2535 - DNA, 1458 bp, Artificial Sequence
  source: /note="Description of Artificial Sequence: Synthetic polynucleotide"
atggccctccctgtcaccgccctgctgcttccgctggctcttctgctccacgccgctcggcccgaagtgcagctcgtcgagagcggagggggactggtgcagcccggaggaagcctgaggctgtcctgcgctgcctccggctacaccttcacctcctactggatgaactgggtcagacaggcacctggaaagggactggtctgggtgtcgcgcattgacccctacgactccgaaacccattacaatcagaaattcaaggaccgcttcaccatctccgtggacaaagccaagagcaccgcgtacctccaaatgaactccctgcgcgctgaggatacagcagtgtactattgcgcccggggaaactgggatgattactggggccagggaactactgtgactgtgtcatccgggggtggcggtagcggaggagggggctccggcggcggcggctcagggggcggaggaagcgacgtggtcatgactcagtccccggactcactcgcggtgtcgcttggagagagagcgaccatcaactgtcgggcctcaaagagcatcagcaaggacctggcctggtaccagcagaagccgggacagccgccaaagctgctgatctactccgggtccaccttgcaatctggtgtccctgaccggttctccggttccgggtcgggtaccgacttcacgctcactatttcgtcgctgcaagccgaagatgtggccgtgtactattgccaacagcacaacaagtacccctacacttttggcggaggcaccaaggtggaaatcaagaccactaccccagcaccgaggccacccaccccggctcctaccatcgcctcccagcctctgtccctgcgtccggaggcatgtagacccgcagctggtggggccgtgcatacccggggtcttgacttcgcctgcgatatctacatttgggcccctctggctggtacttgcggggtcctgctgctttcactcgtgatcactctttactgtaagcgcggtcggaagaagctgctgtacatctttaagcaacccttcatgaggcctgtgcagactactcaagaggaggacggctgttcatgccggttcccagaggaggaggaaggcggctgcgaactgcgcgtgaaattcagccgcagcgcagatgctccagcctacaagcaggggcagaaccagctctacaacgaactcaatcttggtcggagagaggagtacgacgtgctggacaagcggagaggacgggacccagaaatgggcgggaagccgcgcagaaagaatccccaagagggcctgtacaacgagctccaaaaggataagatggcagaagcctatagcgagattggtatgaaaggggaacgcagaagaggcaaaggccacgacggactgtaccagggactcagcaccgccaccaaggacacctatgacgctcttcacatgcaggccctgccgcctcgg

SEQ ID NO: 2536 - protein, 486 aa, Artificial Sequence
  source: /note="Description of Artificial Sequence: Synthetic polypeptide"
MALPVTALLLPLALLLHAARPEVQLVESGGGLVQPGGSLRLSCAASGYTFTSYWMNWVRQAPGKGLVWVSRIDPYDSETHYNQKFKDRFTISVDKAKSTAYLQMNSLRAEDTAVYYCARGNWDDYWGQGTTVTVSSGGGGSGGGGSGGGGSGGGGSDVVMTQSPDSLAVSLGERATINCRASKSISKDLAWYQQKPGQPPKLLIYSGSTLQSGVPDRFSGSGSGTDFTLTISSLQAEDVAVYYCQQHNKYPYTFGGGTKVEIKTTTPAPRPPTPAPTIASQPLSLRPEACRPAAGGAVHTRGLDFACDIYIWAPLAGTCGVLLLSLVITLYCKRGRKKLLYIFKQPFMRPVQTTQEEDGCSCRFPEEEEGGCELRVKFSRSADAPAYKQGQNQLYNELNLGRREEYDVLDKRRGRDPEMGGKPRRKNPQEGLYNELQKDKMAEAYSEIGMKGERRRGKGHDGLYQGLSTATKDTYDALHMQALPPR

SEQ ID NO: 2537 - protein, 263 aa, Artificial Sequence
  source: /note="Description of Artificial Sequence: Synthetic polypeptide"
MALPVTALLLPLALLLHAARPEVQLVESGGGLVQPGGSLRLSCAASGYTFTSYWMNWVRQAPGKGLVWVSRIDPYDSETHYNQKFKDRFTISVDKAKSTAYLQMNSLRAEDTAVYYCARGNWDDYWGQGTTVTVSSGGGGSGGGGSGGGGSGGGGSDVVMTQSPDSLAVSLGERATINCRASKSISKDLAWYQQKPGQPPKLLIYSGSTLQSGVPDRFSGSGSGTDFTLTISSLQAEDVAVYYCQQHNKYPYTFGGGTKVEIK

SEQ ID NO: 2538 - DNA, 1458 bp, Artificial Sequence
  source: /note="Description of Artificial Sequence: Synthetic polynucleotide"
atggccctccctgtcaccgccctgctgcttccgctggctcttctgctccacgccgctcggcccgacgtgcagctcacccagtcgccctcatttctgtcggcctcagtgggagacagagtgaccattacttgtcgggcctccaagagcatctccaaggacctggcctggtatcagcagaagccaggaaaggcgcctaagttgctcatctactcggggtcgaccctgcaatctggcgtgccgtcccggttctccggttcgggaagcggtaccgaattcacccttactatctcctccctgcaaccggaggacttcgccacctactactgccaacagcacaacaagtacccgtacactttcgggggtggcacgaaggtcgaaatcaaggggggtggcggtagcggaggagggggctccggcggcggcggctcagggggcggaggaagcgaagtgcagctcgtcgagagcggagggggactggtgcagcccggaggaagcctgaggctgtcctgcgctgcctccggctacaccttcacctcctactggatgaactgggtcagacaggcacctggaaagggactggtctgggtgtcgcgcattgacccctacgactccgaaacccattacaatcagaaattcaaggaccgcttcaccatctccgtggacaaagccaagagcaccgcgtacctccaaatgaactccctgcgcgctgaggatacagcagtgtactattgcgcccggggaaactgggatgattactggggccagggaactactgtgactgtgtcatccaccactaccccagcaccgaggccacccaccccggctcctaccatcgcctcccagcctctgtccctgcgtccggaggcatgtagacccgcagctggtggggccgtgcatacccggggtcttgacttcgcctgcgatatctacatttgggcccctctggctggtacttgcggggtcctgctgctttcactcgtgatcactctttactgtaagcgcggtcggaagaagctgctgtacatctttaagcaacccttcatgaggcctgtgcagactactcaagaggaggacggctgttcatgccggttcccagaggaggaggaaggcggctgcgaactgcgcgtgaaattcagccgcagcgcagatgctccagcctacaagcaggggcagaaccagctctacaacgaactcaatcttggtcggagagaggagtacgacgtgctggacaagcggagaggacgggacccagaaatgggcgggaagccgcgcagaaagaatccccaagagggcctgtacaacgagctccaaaaggataagatggcagaagcctatagcgagattggtatgaaaggggaacgcagaagaggcaaaggccacgacggactgtaccagggactcagcaccgccaccaaggacacctatgacgctcttcacatgcaggccctgccgcctcgg

SEQ ID NO: 2539 - protein, 486 aa, Artificial Sequence
  source: /note="Description of Artificial Sequence: Synthetic polypeptide"
MALPVTALLLPLALLLHAARPDVQLTQSPSFLSASVGDRVTITCRASKSISKDLAWYQQKPGKAPKLLIYSGSTLQSGVPSRFSGSGSGTEFTLTISSLQPEDFATYYCQQHNKYPYTFGGGTKVEIKGGGGSGGGGSGGGGSGGGGSEVQLVESGGGLVQPGGSLRLSCAASGYTFTSYWMNWVRQAPGKGLVWVSRIDPYDSETHYNQKFKDRFTISVDKAKSTAYLQMNSLRAEDTAVYYCARGNWDDYWGQGTTVTVSSTTTPAPRPPTPAPTIASQPLSLRPEACRPAAGGAVHTRGLDFACDIYIWAPLAGTCGVLLLSLVITLYCKRGRKKLLYIFKQPFMRPVQTTQEEDGCSCRFPEEEEGGCELRVKFSRSADAPAYKQGQNQLYNELNLGRREEYDVLDKRRGRDPEMGGKPRRKNPQEGLYNELQKDKMAEAYSEIGMKGERRRGKGHDGLYQGLSTATKDTYDALHMQALPPR

SEQ ID NO: 2540 - protein, 263 aa, Artificial Sequence
  source: /note="Description of Artificial Sequence: Synthetic polypeptide"
MALPVTALLLPLALLLHAARPDVQLTQSPSFLSASVGDRVTITCRASKSISKDLAWYQQKPGKAPKLLIYSGSTLQSGVPSRFSGSGSGTEFTLTISSLQPEDFATYYCQQHNKYPYTFGGGTKVEIKGGGGSGGGGSGGGGSGGGGSEVQLVESGGGLVQPGGSLRLSCAASGYTFTSYWMNWVRQAPGKGLVWVSRIDPYDSETHYNQKFKDRFTISVDKAKSTAYLQMNSLRAEDTAVYYCARGNWDDYWGQGTTVTVSS

SEQ ID NO: 2541 - DNA, 1458 bp, Artificial Sequence
  source: /note="Description of Artificial Sequence: Synthetic polynucleotide"
atggccctccctgtcaccgccctgctgcttccgctggctcttctgctccacgccgctcggcccgaagtggtgctgacccagtcgcccgcaaccctctctctgtcgccgggagaacgcgccactctttcctgtcgggcgtccaagagcatctcaaaggacctcgcctggtaccagcagaagcctggtcaagccccgcggctgctgatctactccggctccacgctgcaatcaggaatcccagccagattttccggttcggggtcggggactgacttcaccttgaccattagctcgctggaacctgaggacttcgccgtgtattactgccagcagcacaacaagtacccgtacaccttcggaggcggtactaaggtcgagatcaaggggggtggcggtagcggaggagggggctccggcggcggcggctcagggggcggaggaagcgaagtgcagctcgtcgagagcggagggggactggtgcagcccggaggaagcctgaggctgtcctgcgctgcctccggctacaccttcacctcctactggatgaactgggtcagacaggcacctggaaagggactggtctgggtgtcgcgcattgacccctacgactccgaaacccattacaatcagaaattcaaggaccgcttcaccatctccgtggacaaagccaagagcaccgcgtacctccaaatgaactccctgcgcgctgaggatacagcagtgtactattgcgcccggggaaactgggatgattactggggccagggaactactgtgactgtgtcatccaccactaccccagcaccgaggccacccaccccggctcctaccatcgcctcccagcctctgtccctgcgtccggaggcatgtagacccgcagctggtggggccgtgcatacccggggtcttgacttcgcctgcgatatctacatttgggcccctctggctggtacttgcggggtcctgctgctttcactcgtgatcactctttactgtaagcgcggtcggaagaagctgctgtacatctttaagcaacccttcatgaggcctgtgcagactactcaagaggaggacggctgttcatgccggttcccagaggaggaggaaggcggctgcgaactgcgcgtgaaattcagccgcagcgcagatgctccagcctacaagcaggggcagaaccagctctacaacgaactcaatcttggtcggagagaggagtacgacgtgctggacaagcggagaggacgggacccagaaatgggcgggaagccgcgcagaaagaatccccaagagggcctgtacaacgagctccaaaaggataagatggcagaagcctatagcgagattggtatgaaaggggaacgcagaagaggcaaaggccacgacggactgtaccagggactcagcaccgccaccaaggacacctatgacgctcttcacatgcaggccctgccgcctcgg

SEQ ID NO: 2542 - protein, 486 aa, Artificial Sequence
  source: /note="Description of Artificial Sequence: Synthetic polypeptide"
MALPVTALLLPLALLLHAARPEVVLTQSPATLSLSPGERATLSCRASKSISKDLAWYQQKPGQAPRLLIYSGSTLQSGIPARFSGSGSGTDFTLTISSLEPEDFAVYYCQQHNKYPYTFGGGTKVEIKGGGGSGGGGSGGGGSGGGGSEVQLVESGGGLVQPGGSLRLSCAASGYTFTSYWMNWVRQAPGKGLVWVSRIDPYDSETHYNQKFKDRFTISVDKAKSTAYLQMNSLRAEDTAVYYCARGNWDDYWGQGTTVTVSSTTTPAPRPPTPAPTIASQPLSLRPEACRPAAGGAVHTRGLDFACDIYIWAPLAGTCGVLLLSLVITLYCKRGRKKLLYIFKQPFMRPVQTTQEEDGCSCRFPEEEEGGCELRVKFSRSADAPAYKQGQNQLYNELNLGRREEYDVLDKRRGRDPEMGGKPRRKNPQEGLYNELQKDKMAEAYSEIGMKGERRRGKGHDGLYQGLSTATKDTYDALHMQALPPR

SEQ ID NO: 2543 - protein, 263 aa, Artificial Sequence
  source: /note="Description of Artificial Sequence: Synthetic polypeptide"
MALPVTALLLPLALLLHAARPEVVLTQSPATLSLSPGERATLSCRASKSISKDLAWYQQKPGQAPRLLIYSGSTLQSGIPARFSGSGSGTDFTLTISSLEPEDFAVYYCQQHNKYPYTFGGGTKVEIKGGGGSGGGGSGGGGSGGGGSEVQLVESGGGLVQPGGSLRLSCAASGYTFTSYWMNWVRQAPGKGLVWVSRIDPYDSETHYNQKFKDRFTISVDKAKSTAYLQMNSLRAEDTAVYYCARGNWDDYWGQGTTVTVSS

SEQ ID NO: 2544 - DNA, 1458 bp, Artificial Sequence
  source: /note="Description of Artificial Sequence: Synthetic polynucleotide"
atggccctccctgtcaccgccctgctgcttccgctggctcttctgctccacgccgctcggcccgacgtcgtgatgacccagtcaccggcattcctgtccgtgactcccggagaaaaggtcacgattacttgccgggcgtccaagagcatctccaaggacctcgcctggtaccaacagaagccggaccaggcccctaagctgttgatctactcggggtccacccttcaatcgggagtgccatcgcggtttagcggttcgggttctgggaccgacttcactttcaccatctcctcactggaagccgaggatgccgccacttactactgtcagcagcacaacaagtatccgtacaccttcggaggcggtaccaaagtggagatcaaggggggtggcggtagcggaggagggggctccggcggcggcggctcagggggcggaggaagcgaagtgcagctcgtcgagagcggagggggactggtgcagcccggaggaagcctgaggctgtcctgcgctgcctccggctacaccttcacctcctactggatgaactgggtcagacaggcacctggaaagggactggtctgggtgtcgcgcattgacccctacgactccgaaacccattacaatcagaaattcaaggaccgcttcaccatctccgtggacaaagccaagagcaccgcgtacctccaaatgaactccctgcgcgctgaggatacagcagtgtactattgcgcccggggaaactgggatgattactggggccagggaactactgtgactgtgtcatccaccactaccccagcaccgaggccacccaccccggctcctaccatcgcctcccagcctctgtccctgcgtccggaggcatgtagacccgcagctggtggggccgtgcatacccggggtcttgacttcgcctgcgatatctacatttgggcccctctggctggtacttgcggggtcctgctgctttcactcgtgatcactctttactgtaagcgcggtcggaagaagctgctgtacatctttaagcaacccttcatgaggcctgtgcagactactcaagaggaggacggctgttcatgccggttcccagaggaggaggaaggcggctgcgaactgcgcgtgaaattcagccgcagcgcagatgctccagcctacaagcaggggcagaaccagctctacaacgaactcaatcttggtcggagagaggagtacgacgtgctggacaagcggagaggacgggacccagaaatgggcgggaagccgcgcagaaagaatccccaagagggcctgtacaacgagctccaaaaggataagatggcagaagcctatagcgagattggtatgaaaggggaacgcagaagaggcaaaggccacgacggactgtaccagggactcagcaccgccaccaaggacacctatgacgctcttcacatgcaggccctgccgcctcgg

SEQ ID NO: 2545 - protein, 486 aa, Artificial Sequence
  source: /note="Description of Artificial Sequence: Synthetic polypeptide"
MALPVTALLLPLALLLHAARPDVVMTQSPAFLSVTPGEKVTITCRASKSISKDLAWYQQKPDQAPKLLIYSGSTLQSGVPSRFSGSGSGTDFTFTISSLEAEDAATYYCQQHNKYPYTFGGGTKVEIKGGGGSGGGGSGGGGSGGGGSEVQLVESGGGLVQPGGSLRLSCAASGYTFTSYWMNWVRQAPGKGLVWVSRIDPYDSETHYNQKFKDRFTISVDKAKSTAYLQMNSLRAEDTAVYYCARGNWDDYWGQGTTVTVSSTTTPAPRPPTPAPTIASQPLSLRPEACRPAAGGAVHTRGLDFACDIYIWAPLAGTCGVLLLSLVITLYCKRGRKKLLYIFKQPFMRPVQTTQEEDGCSCRFPEEEEGGCELRVKFSRSADAPAYKQGQNQLYNELNLGRREEYDVLDKRRGRDPEMGGKPRRKNPQEGLYNELQKDKMAEAYSEIGMKGERRRGKGHDGLYQGLSTATKDTYDALHMQALPPR

SEQ ID NO: 2546 - protein, 263 aa, Artificial Sequence
  source: /note="Description of Artificial Sequence: Synthetic polypeptide"
MALPVTALLLPLALLLHAARPDVVMTQSPAFLSVTPGEKVTITCRASKSISKDLAWYQQKPDQAPKLLIYSGSTLQSGVPSRFSGSGSGTDFTFTISSLEAEDAATYYCQQHNKYPYTFGGGTKVEIKGGGGSGGGGSGGGGSGGGGSEVQLVESGGGLVQPGGSLRLSCAASGYTFTSYWMNWVRQAPGKGLVWVSRIDPYDSETHYNQKFKDRFTISVDKAKSTAYLQMNSLRAEDTAVYYCARGNWDDYWGQGTTVTVSS

SEQ ID NO: 2547 - DNA, 1458 bp, Artificial Sequence
  source: /note="Description of Artificial Sequence: Synthetic polynucleotide"
atggccctccctgtcaccgccctgctgcttccgctggctcttctgctccacgccgctcggcccgacgtggtcatgactcagtccccggactcactcgcggtgtcgcttggagagagagcgaccatcaactgtcgggcctcaaagagcatcagcaaggacctggcctggtaccagcagaagccgggacagccgccaaagctgctgatctactccgggtccaccttgcaatctggtgtccctgaccggttctccggttccgggtcgggtaccgacttcacgctcactatttcgtcgctgcaagccgaagatgtggccgtgtactattgccaacagcacaacaagtacccctacacttttggcggaggcaccaaggtggaaatcaaggggggtggcggtagcggaggagggggctccggcggcggcggctcagggggcggaggaagcgaagtgcagctcgtcgagagcggagggggactggtgcagcccggaggaagcctgaggctgtcctgcgctgcctccggctacaccttcacctcctactggatgaactgggtcagacaggcacctggaaagggactggtctgggtgtcgcgcattgacccctacgactccgaaacccattacaatcagaaattcaaggaccgcttcaccatctccgtggacaaagccaagagcaccgcgtacctccaaatgaactccctgcgcgctgaggatacagcagtgtactattgcgcccggggaaactgggatgattactggggccagggaactactgtgactgtgtcatccaccactaccccagcaccgaggccacccaccccggctcctaccatcgcctcccagcctctgtccctgcgtccggaggcatgtagacccgcagctggtggggccgtgcatacccggggtcttgacttcgcctgcgatatctacatttgggcccctctggctggtacttgcggggtcctgctgctttcactcgtgatcactctttactgtaagcgcggtcggaagaagctgctgtacatctttaagcaacccttcatgaggcctgtgcagactactcaagaggaggacggctgttcatgccggttcccagaggaggaggaaggcggctgcgaactgcgcgtgaaattcagccgcagcgcagatgctccagcctacaagcaggggcagaaccagctctacaacgaactcaatcttggtcggagagaggagtacgacgtgctggacaagcggagaggacgggacccagaaatgggcgggaagccgcgcagaaagaatccccaagagggcctgtacaacgagctccaaaaggataagatggcagaagcctatagcgagattggtatgaaaggggaacgcagaagaggcaaaggccacgacggactgtaccagggactcagcaccgccaccaaggacacctatgacgctcttcacatgcaggccctgccgcctcgg

SEQ ID NO: 2548 - protein, 486 aa, Artificial Sequence
  source: /note="Description of Artificial Sequence: Synthetic polypeptide"
MALPVTALLLPLALLLHAARPDVVMTQSPDSLAVSLGERATINCRASKSISKDLAWYQQKPGQPPKLLIYSGSTLQSGVPDRFSGSGSGTDFTLTISSLQAEDVAVYYCQQHNKYPYTFGGGTKVEIKGGGGSGGGGSGGGGSGGGGSEVQLVESGGGLVQPGGSLRLSCAASGYTFTSYWMNWVRQAPGKGLVWVSRIDPYDSETHYNQKFKDRFTISVDKAKSTAYLQMNSLRAEDTAVYYCARGNWDDYWGQGTTVTVSSTTTPAPRPPTPAPTIASQPLSLRPEACRPAAGGAVHTRGLDFACDIYIWAPLAGTCGVLLLSLVITLYCKRGRKKLLYIFKQPFMRPVQTTQEEDGCSCRFPEEEEGGCELRVKFSRSADAPAYKQGQNQLYNELNLGRREEYDVLDKRRGRDPEMGGKPRRKNPQEGLYNELQKDKMAEAYSEIGMKGERRRGKGHDGLYQGLSTATKDTYDALHMQALPPR

SEQ ID NO: 2549 - protein, 263 aa, Artificial Sequence
  source: /note="Description of Artificial Sequence: Synthetic polypeptide"
MALPVTALLLPLALLLHAARPDVVMTQSPDSLAVSLGERATINCRASKSISKDLAWYQQKPGQPPKLLIYSGSTLQSGVPDRFSGSGSGTDFTLTISSLQAEDVAVYYCQQHNKYPYTFGGGTKVEIKGGGGSGGGGSGGGGSGGGGSEVQLVESGGGLVQPGGSLRLSCAASGYTFTSYWMNWVRQAPGKGLVWVSRIDPYDSETHYNQKFKDRFTISVDKAKSTAYLQMNSLRAEDTAVYYCARGNWDDYWGQGTTVTVSS

SEQ ID NO: 2550 - DNA, 729 bp, Artificial Sequence
  source: /note="Description of Artificial Sequence: Synthetic polynucleotide"
caagtgcaactcgtccaaagcggagcggaagtcaagaaacccggagcgagcgtgaaagtgtcctgcaaagcctccggctacacctttacgggctactacatgcactgggtgcgccaggcaccaggacagggtcttgaatggatgggatggatcaaccctaattcgggcggaactaactacgcacagaagttccaggggagagtgactctgactcgggatacctccatctcaactgtctacatggaactctcccgcttgcggtcagatgatacggcagtgtactactgcgcccgcgacatgaatatcctggctaccgtgccgttcgacatctggggacaggggactatggttactgtctcatcgggcggtggaggttcaggaggaggcggctcgggaggcggaggttcggacattcagatgacccagtccccatcctctctgtcggccagcgtcggagatagggtgaccattacctgtcgggcctcgcaaagcatctcctcgtacctcaactggtatcagcaaaagccgggaaaggcgcctaagctgctgatctacgccgcttcgagcttgcaaagcggggtgccatccagattctcgggatcaggctcaggaaccgacttcaccctgaccgtgaacagcctccagccggaggactttgccacttactactgccagcagggagactccgtgccgcttactttcggggggggtacccgcctggagatcaag

SEQ ID NO: 2551 - protein, 243 aa, Artificial Sequence
  source: /note="Description of Artificial Sequence: Synthetic polypeptide"
QVQLVQSGAEVKKPGASVKVSCKASGYTFTGYYMHWVRQAPGQGLEWMGWINPNSGGTNYAQKFQGRVTLTRDTSISTVYMELSRLRSDDTAVYYCARDMNILATVPFDIWGQGTMVTVSSGGGGSGGGGSGGGGSDIQMTQSPSSLSASVGDRVTITCRASQSISSYLNWYQQKPGKAPKLLIYAASSLQSGVPSRFSGSGSGTDFTLTVNSLQPEDFATYYCQQGDSVPLTFGGGTRLEIK

SEQ ID NO: 2552 - DNA, 1760 bp, Artificial Sequence
  source: /note="Description of Artificial Sequence: Synthetic polynucleotide"
atggccctccctgtcaccgccctgctgcttccgctggctcttctgctccacgccgctcggccccaagtgcaactcgtccaaagcggagcggaagtcaagaaacccggagcgagcgtgaaagtgtcctgcaaagcctccggctacacctttacgggctactacatgcactgggtgcgccaggcaccaggacagggtcttgaatggatgggatggatcaaccctaattcgggcggaactaactacgcacagaagttccaggggagagtgactctgactcgggatacctccatctcaactgtctacatggaactctcccgcttgcggtcagatgatacggcagtgtactactgcgcccgcgacatgaatatcctggctaccgtgccgttcgacatctggggacaggggactatggttactgtctcatcgggcggtggaggttcaggaggaggcggctcgggaggcggaggttcggacattcagatgacccagtccccatcctctctgtcggccagcgtcggagatagggtgaccattacctgtcgggcctcgcaaagcatctcctcgtacctcaactggtatcagcaaaagccgggaaaggcgcctaagctgctgatctacgccgcttcgagcttgcaaagcggggtgccatccagattctcgggatcaggctcaggaaccgacttcaccctgaccgtgaacagcctccagccggaggactttgccacttactactgccagcagggagactccgtgccgcttactttcggggggggtacccgcctggagatcaagaccactaccccagcaccgaggccacccaccccggctcctaccatcgcctcccagcctctgtccctgcgtccggaggcatgtagacccgcagctggtggggccgtgcatacccggggtcttgacttcgcctgcgatatctacatttgggcccctctggctggtacttgcggggtcctgctgctttcactcgtgatcactctttactgtaagcgcggtcggaagaagctgctgtacatctttaagcaacccttcatgaggcctgtgcagactactcaagaggaggacggctgttcttgccggttcccagaggaggaggaaggcggctgcgaactgcgcgtgaaattcagccgcagcgcagacgctccagcctacaagcaggggcagaaccagctctacaacgaactcaatcttggtcggagagaggagtacgacgtgctggacaagcggagaggacgggacccagaaatgggcgggaagccgcgcagaaagaatccccaagagggcctgtacaacgagctccaaaaggataagatggcagaagcctatagcgagattggtatgaaaggggaacgcagaagaggcaaaggccacgacggactgtaccagggactcagcaccgccaccaaggacacctatgacgctcttcacatgcaggccctgccgcctcggtaagtcgacagctcgctttcttgctgtccaatttctattaaaggttcctttgttccctaagtccaactactaaactgggggatattatgaagggccttgagcatctggattctgcctaataaaaaacatttattttcattgctgcgtcgagagctcgctttcttgctgtccaatttctattaaaggttcctttgttccctaagtccaactactaaactgggggatattatgaagggccttgagcatctggattctgcctaataaaaaacatttattttcattgctgcctcgacgaattc

SEQ ID NO: 2553 - DNA, 729 bp, Artificial Sequence
  source: /note="Description of Artificial Sequence: Synthetic polynucleotide"
caagtccaactcgttcaatccggcgcagaagtcaagaagccaggagcatcagtgaaagtgtcctgcaaagcctcaggctacatcttcacgggatactacatccactgggtgcgccaggctccgggccagggccttgagtggatgggctggatcaaccctaactctgggggaaccaactacgctcagaagttccaggggagggtcactatgactcgcgatacctccatctccactgcgtacatggaactctcgggactgagatccgacgatcctgccgtgtactactgcgcccgggacatgaacatcttggcgaccgtgccgtttgacatttggggacagggcaccctcgtcactgtgtcgagcggtggaggaggctcggggggtggcggatcaggagggggaggaagcgacatccagctgactcagagcccatcgtcgttgtccgcgtcggtgggggatagagtgaccattacttgccgcgccagccagagcatctcatcatatctgaattggtaccagcagaagcccggaaaggccccaaaactgctgatctacgctgcaagcagcctccaatcgggagtgccgtcacggttctccgggtccggttcgggaactgactttaccctgaccgtgaattcgctgcaaccggaggatttcgccacgtactactgtcagcaaggagactccgtgccgctgaccttcggtggaggcaccaaggtcgaaatcaag

SEQ ID NO: 2554 - protein, 243 aa, Artificial Sequence
  source: /note="Description of Artificial Sequence: Synthetic polypeptide"
QVQLVQSGAEVKKPGASVKVSCKASGYIFTGYYIHWVRQAPGQGLEWMGWINPNSGGTNYAQKFQGRVTMTRDTSISTAYMELSGLRSDDPAVYYCARDMNILATVPFDIWGQGTLVTVSSGGGGSGGGGSGGGGSDIQLTQSPSSLSASVGDRVTITCRASQSISSYLNWYQQKPGKAPKLLIYAASSLQSGVPSRFSGSGSGTDFTLTVNSLQPEDFATYYCQQGDSVPLTFGGGTKVEIK

SEQ ID NO: 2555 - DNA, 735 bp, Artificial Sequence
  source: /note="Description of Artificial Sequence: Synthetic polynucleotide"
caagtccaactccaacagtcaggcgcagaagtgaaaaagagcggtgcatcggtgaaagtgtcatgcaaagcctcgggctacaccttcactgactactatatgcactggctgcggcaggcaccgggacagggacttgagtggatgggatggatcaacccgaattcaggggacactaactacgcgcagaagttccaggggagagtgaccctgacgagggacacctcaatttcgaccgtctacatggaattgtcgcgcctgagatcggacgatactgctgtgtactactgtgcccgcgacatgaacatcctcgcgactgtgccttttgatatctggggacaggggactatggtcaccgtttcctccgcttccggtggcggaggctcgggaggccgggcctccggtggaggaggcagcgacatccagatgactcagagcccttcctcgctgagcgcctcagtgggagatcgcgtgaccatcacttgccgggccagccagtccatttcgtcctacctcaattggtaccagcagaagccgggaaaggcgcccaagctcttgatctacgctgcgagctccctgcaaagcggggtgccgagccgattctcgggttccggctcgggaaccgacttcactctgaccatctcatccctgcaaccagaggactttgccacctactactgccaacaaggagattctgtcccactgacgttcggcggaggaaccaaggtcgaaatcaag

SEQ ID NO: 2556 - protein, 245 aa, Artificial Sequence
  source: /note="Description of Artificial Sequence: Synthetic polypeptide"
QVQLQQSGAEVKKSGASVKVSCKASGYTFTDYYMHWLRQAPGQGLEWMGWINPNSGDTNYAQKFQGRVTLTRDTSISTVYMELSRLRSDDTAVYYCARDMNILATVPFDIWGQGTMVTVSSASGGGGSGGRASGGGGSDIQMTQSPSSLSASVGDRVTITCRASQSISSYLNWYQQKPGKAPKLLIYAASSLQSGVPSRFSGSGSGTDFTLTISSLQPEDFATYYCQQGDSVPLTFGGGTKVEIK

SEQ ID NO: 2557 - protein, 243 aa, Artificial Sequence
  source: /note="Description of Artificial Sequence: Synthetic polypeptide"
QVQLVQSGAEVKKPGASVKVSCKASGYTFTGYYMHWVRQAPGQGLEWMGWINPNSGGTNYAQKFQGRVTMTRDTSISTAYMELSRLRSDDTAVYYCARDMNILATVPFDIWGQGTMVTVSSGGGGSGGGGSGGGGSDIQMTQSPSSLSASVGDRVTITCRASQSISTYLNWYQQKPGKAPNLLIYAAFSLQSGVPSRFSGSGSGTDFTLTINSLQPEDFATYYCQQGDSVPLTFGGGTKLEIK

SEQ ID NO: 2558 - protein, 242 aa, Artificial Sequence
  source: /note="Description of Artificial Sequence: Synthetic polypeptide"
QVQLVQSGAEVKKPGASVKVSCKASGYTFTSYWMNWVRQAPGQGLEWMGRIDPYDSETHYNQKFKDRVTMTVDKSTSTAYMELSSLRSEDTAVYYCARGNWDDYWGQGTTVTVSSGGGGSGGGGSGGGGSGGGGSDVQLTQSPSFLSASVGDRVTITCRASKSISKDLAWYQQKPGKAPKLLIYSGSTLQSGVPSRFSGSGSGTEFTLTISSLQPEDFATYYCQQHNKYPYTFGGGTKVEIK

SEQ ID NO: 2559 - protein, 242 aa, Artificial Sequence
  source: /note="Description of Artificial Sequence: Synthetic polypeptide"
QVQLVQSGAEVKKPGASVKVSCKASGYTFTSYWMNWVRQAPGQGLEWMGRIDPYDSETHYNQKFKDRVTMTVDKSTSTAYMELSSLRSEDTAVYYCARGNWDDYWGQGTTVTVSSGGGGSGGGGSGGGGSGGGGSEVVLTQSPATLSLSPGERATLSCRASKSISKDLAWYQQKPGQAPRLLIYSGSTLQSGIPARFSGSGSGTDFTLTISSLEPEDFAVYYCQQHNKYPYTFGGGTKVEIK

SEQ ID NO: 2560 - protein, 242 aa, Artificial Sequence
  source: /note="Description of Artificial Sequence: Synthetic polypeptide"
QVQLVQSGAEVKKPGASVKVSCKASGYTFTSYWMNWVRQAPGQGLEWMGRIDPYDSETHYNQKFKDRVTMTVDKSTSTAYMELSSLRSEDTAVYYCARGNWDDYWGQGTTVTVSSGGGGSGGGGSGGGGSGGGGSDVVMTQSPAFLSVTPGEKVTITCRASKSISKDLAWYQQKPDQAPKLLIYSGSTLQSGVPSRFSGSGSGTDFTFTISSLEAEDAATYYCQQHNKYPYTFGGGTKVEIK

SEQ ID NO: 2561 - protein, 242 aa, Artificial Sequence
  source: /note="Description of Artificial Sequence: Synthetic polypeptide"
QVQLVQSGAEVKKPGASVKVSCKASGYTFTSYWMNWVRQAPGQGLEWMGRIDPYDSETHYNQKFKDRVTMTVDKSTSTAYMELSSLRSEDTAVYYCARGNWDDYWGQGTTVTVSSGGGGSGGGGSGGGGSGGGGSDVVMTQSPDSLAVSLGERATINCRASKSISKDLAWYQQKPGQPPKLLIYSGSTLQSGVPDRFSGSGSGTDFTLTISSLQAEDVAVYYCQQHNKYPYTFGGGTKVEIK

SEQ ID NO: 2562 - protein, 242 aa, Artificial Sequence
  source: /note="Description of Artificial Sequence: Synthetic polypeptide"
DVQLTQSPSFLSASVGDRVTITCRASKSISKDLAWYQQKPGKAPKLLIYSGSTLQSGVPSRFSGSGSGTEFTLTISSLQPEDFATYYCQQHNKYPYTFGGGTKVEIKGGGGSGGGGSGGGGSGGGGSQVQLVQSGAEVKKPGASVKVSCKASGYTFTSYWMNWVRQAPGQGLEWMGRIDPYDSETHYNQKFKDRVTMTVDKSTSTAYMELSSLRSEDTAVYYCARGNWDDYWGQGTTVTVSS

SEQ ID NO: 2563 - protein, 242 aa, Artificial Sequence
  source: /note="Description of Artificial Sequence: Synthetic polypeptide"
EVVLTQSPATLSLSPGERATLSCRASKSISKDLAWYQQKPGQAPRLLIYSGSTLQSGIPARFSGSGSGTDFTLTISSLEPEDFAVYYCQQHNKYPYTFGGGTKVEIKGGGGSGGGGSGGGGSGGGGSQVQLVQSGAEVKKPGASVKVSCKASGYTFTSYWMNWVRQAPGQGLEWMGRIDPYDSETHYNQKFKDRVTMTVDKSTSTAYMELSSLRSEDTAVYYCARGNWDDYWGQGTTVTVSS

SEQ ID NO: 2564 - protein, 242 aa, Artificial Sequence
  source: /note="Description of Artificial Sequence: Synthetic polypeptide"
DVVMTQSPAFLSVTPGEKVTITCRASKSISKDLAWYQQKPDQAPKLLIYSGSTLQSGVPSRFSGSGSGTDFTFTISSLEAEDAATYYCQQHNKYPYTFGGGTKVEIKGGGGSGGGGSGGGGSGGGGSQVQLVQSGAEVKKPGASVKVSCKASGYTFTSYWMNWVRQAPGQGLEWMGRIDPYDSETHYNQKFKDRVTMTVDKSTSTAYMELSSLRSEDTAVYYCARGNWDDYWGQGTTVTVSS

SEQ ID NO: 2565 - protein, 242 aa, Artificial Sequence
  source: /note="Description of Artificial Sequence: Synthetic polypeptide"
DVVMTQSPDSLAVSLGERATINCRASKSISKDLAWYQQKPGQPPKLLIYSGSTLQSGVPDRFSGSGSGTDFTLTISSLQAEDVAVYYCQQHNKYPYTFGGGTKVEIKGGGGSGGGGSGGGGSGGGGSQVQLVQSGAEVKKPGASVKVSCKASGYTFTSYWMNWVRQAPGQGLEWMGRIDPYDSETHYNQKFKDRVTMTVDKSTSTAYMELSSLRSEDTAVYYCARGNWDDYWGQGTTVTVSS

SEQ ID NO: 2566 - protein, 242 aa, Artificial Sequence
  source: /note="Description of Artificial Sequence: Synthetic polypeptide"
QVQLVQSGSELKKPGASVKVSCKASGYTFTSYWMNWVRQAPGQGLEWMGRIDPYDSETHYNQKFKDRFVFSVDKSVSTAYLQISSLKAEDTAVYYCARGNWDDYWGQGTTVTVSSGGGGSGGGGSGGGGSGGGGSDVQLTQSPSFLSASVGDRVTITCRASKSISKDLAWYQQKPGKAPKLLIYSGSTLQSGVPSRFSGSGSGTEFTLTISSLQPEDFATYYCQQHNKYPYTFGGGTKVEIK

SEQ ID NO: 2567 - protein, 242 aa, Artificial Sequence
  source: /note="Description of Artificial Sequence: Synthetic polypeptide"
QVQLVQSGSELKKPGASVKVSCKASGYTFTSYWMNWVRQAPGQGLEWMGRIDPYDSETHYNQKFKDRFVFSVDKSVSTAYLQISSLKAEDTAVYYCARGNWDDYWGQGTTVTVSSGGGGSGGGGSGGGGSGGGGSEVVLTQSPATLSLSPGERATLSCRASKSISKDLAWYQQKPGQAPRLLIYSGSTLQSGIPARFSGSGSGTDFTLTISSLEPEDFAVYYCQQHNKYPYTFGGGTKVEIK

SEQ ID NO: 2568 - protein, 242 aa, Artificial Sequence
  source: /note="Description of Artificial Sequence: Synthetic polypeptide"
QVQLVQSGSELKKPGASVKVSCKASGYTFTSYWMNWVRQAPGQGLEWMGRIDPYDSETHYNQKFKDRFVFSVDKSVSTAYLQISSLKAEDTAVYYCARGNWDDYWGQGTTVTVSSGGGGSGGGGSGGGGSGGGGSDVVMTQSPAFLSVTPGEKVTITCRASKSISKDLAWYQQKPDQAPKLLIYSGSTLQSGVPSRFSGSGSGTDFTFTISSLEAEDAATYYCQQHNKYPYTFGGGTKVEIK

SEQ ID NO: 2569 - protein, 242 aa, Artificial Sequence
  source: /note="Description of Artificial Sequence: Synthetic polypeptide"
QVQLVQSGSELKKPGASVKVSCKASGYTFTSYWMNWVRQAPGQGLEWMGRIDPYDSETHYNQKFKDRFVFSVDKSVSTAYLQISSLKAEDTAVYYCARGNWDDYWGQGTTVTVSSGGGGSGGGGSGGGGSGGGGSDVVMTQSPDSLAVSLGERATINCRASKSISKDLAWYQQKPGQPPKLLIYSGSTLQSGVPDRFSGSGSGTDFTLTISSLQAEDVAVYYCQQHNKYPYTFGGGTKVEIK

SEQ ID NO: 2570 - protein, 242 aa, Artificial Sequence
  source: /note="Description of Artificial Sequence: Synthetic polypeptide"
DVQLTQSPSFLSASVGDRVTITCRASKSISKDLAWYQQKPGKAPKLLIYSGSTLQSGVPSRFSGSGSGTEFTLTISSLQPEDFATYYCQQHNKYPYTFGGGTKVEIKGGGGSGGGGSGGGGSGGGGSQVQLVQSGSELKKPGASVKVSCKASGYTFTSYWMNWVRQAPGQGLEWMGRIDPYDSETHYNQKFKDRFVFSVDKSVSTAYLQISSLKAEDTAVYYCARGNWDDYWGQGTTVTVSS

SEQ ID NO: 2571 - protein, 242 aa, Artificial Sequence
  source: /note="Description of Artificial Sequence: Synthetic polypeptide"
EVVLTQSPATLSLSPGERATLSCRASKSISKDLAWYQQKPGQAPRLLIYSGSTLQSGIPARFSGSGSGTDFTLTISSLEPEDFAVYYCQQHNKYPYTFGGGTKVEIKGGGGSGGGGSGGGGSGGGGSQVQLVQSGSELKKPGASVKVSCKASGYTFTSYWMNWVRQAPGQGLEWMGRIDPYDSETHYNQKFKDRFVFSVDKSVSTAYLQISSLKAEDTAVYYCARGNWDDYWGQGTTVTVSS

SEQ ID NO: 2572 - protein, 242 aa, Artificial Sequence
  source: /note="Description of Artificial Sequence: Synthetic polypeptide"
DVVMTQSPAFLSVTPGEKVTITCRASKSISKDLAWYQQKPDQAPKLLIYSGSTLQSGVPSRFSGSGSGTDFTFTISSLEAEDAATYYCQQHNKYPYTFGGGTKVEIKGGGGSGGGGSGGGGSGGGGSQVQLVQSGSELKKPGASVKVSCKASGYTFTSYWMNWVRQAPGQGLEWMGRIDPYDSETHYNQKFKDRFVFSVDKSVSTAYLQISSLKAEDTAVYYCARGNWDDYWGQGTTVTVSS

SEQ ID NO: 2573 - protein, 242 aa, Artificial Sequence
  source: /note="Description of Artificial Sequence: Synthetic polypeptide"
DVVMTQSPDSLAVSLGERATINCRASKSISKDLAWYQQKPGQPPKLLIYSGSTLQSGVPDRFSGSGSGTDFTLTISSLQAEDVAVYYCQQHNKYPYTFGGGTKVEIKGGGGSGGGGSGGGGSGGGGSQVQLVQSGSELKKPGASVKVSCKASGYTFTSYWMNWVRQAPGQGLEWMGRIDPYDSETHYNQKFKDRFVFSVDKSVSTAYLQISSLKAEDTAVYYCARGNWDDYWGQGTTVTVSS

SEQ ID NO: 2574 - protein, 242 aa, Artificial Sequence
  source: /note="Description of Artificial Sequence: Synthetic polypeptide"
EVQLVQSGAEVKKPGESLRISCKGSGYTFTSYWMNWVRQMPGKGLEWMGRIDPYDSETHYNQKFKDHVTISVDKSISTAYLQWSSLKASDTAMYYCARGNWDDYWGQGTTVTVSSGGGGSGGGGSGGGGSGGGGSDVQLTQSPSFLSASVGDRVTITCRASKSISKDLAWYQQKPGKAPKLLIYSGSTLQSGVPSRFSGSGSGTEFTLTISSLQPEDFATYYCQQHNKYPYTFGGGTKVEIK

SEQ ID NO: 2575 - protein, 242 aa, Artificial Sequence
  source: /note="Description of Artificial Sequence: Synthetic polypeptide"
EVQLVQSGAEVKKPGESLRISCKGSGYTFTSYWMNWVRQMPGKGLEWMGRIDPYDSETHYNQKFKDHVTISVDKSISTAYLQWSSLKASDTAMYYCARGNWDDYWGQGTTVTVSSGGGGSGGGGSGGGGSGGGGSEVVLTQSPATLSLSPGERATLSCRASKSISKDLAWYQQKPGQAPRLLIYSGSTLQSGIPARFSGSGSGTDFTLTISSLEPEDFAVYYCQQHNKYPYTFGGGTKVEIK

SEQ ID NO: 2576 - protein, 242 aa, Artificial Sequence
  source: /note="Description of Artificial Sequence: Synthetic polypeptide"
EVQLVQSGAEVKKPGESLRISCKGSGYTFTSYWMNWVRQMPGKGLEWMGRIDPYDSETHYNQKFKDHVTISVDKSISTAYLQWSSLKASDTAMYYCARGNWDDYWGQGTTVTVSSGGGGSGGGGSGGGGSGGGGSDVVMTQSPAFLSVTPGEKVTITCRASKSISKDLAWYQQKPDQAPKLLIYSGSTLQSGVPSRFSGSGSGTDFTFTISSLEAEDAATYYCQQHNKYPYTFGGGTKVEIK

SEQ ID NO: 2577 - protein, 242 aa, Artificial Sequence
  source: /note="Description of Artificial Sequence: Synthetic polypeptide"
EVQLVQSGAEVKKPGESLRISCKGSGYTFTSYWMNWVRQMPGKGLEWMGRIDPYDSETHYNQKFKDHVTISVDKSISTAYLQWSSLKASDTAMYYCARGNWDDYWGQGTTVTVSSGGGGSGGGGSGGGGSGGGGSDVVMTQSPDSLAVSLGERATINCRASKSISKDLAWYQQKPGQPPKLLIYSGSTLQSGVPDRFSGSGSGTDFTLTISSLQAEDVAVYYCQQHNKYPYTFGGGTKVEIK

SEQ ID NO: 2578 - protein, 242 aa, Artificial Sequence
  source: /note="Description of Artificial Sequence: Synthetic polypeptide"
DVQLTQSPSFLSASVGDRVTITCRASKSISKDLAWYQQKPGKAPKLLIYSGSTLQSGVPSRFSGSGSGTEFTLTISSLQPEDFATYYCQQHNKYPYTFGGGTKVEIKGGGGSGGGGSGGGGSGGGGSEVQLVQSGAEVKKPGESLRISCKGSGYTFTSYWMNWVRQMPGKGLEWMGRIDPYDSETHYNQKFKDHVTISVDKSISTAYLQWSSLKASDTAMYYCARGNWDDYWGQGTTVTVSS

SEQ ID NO: 2579 - protein, 242 aa, Artificial Sequence
  source: /note="Description of Artificial Sequence: Synthetic polypeptide"
EVVLTQSPATLSLSPGERATLSCRASKSISKDLAWYQQKPGQAPRLLIYSGSTLQSGIPARFSGSGSGTDFTLTISSLEPEDFAVYYCQQHNKYPYTFGGGTKVEIKGGGGSGGGGSGGGGSGGGGSEVQLVQSGAEVKKPGESLRISCKGSGYTFTSYWMNWVRQMPGKGLEWMGRIDPYDSETHYNQKFKDHVTISVDKSISTAYLQWSSLKASDTAMYYCARGNWDDYWGQGTTVTVSS

SEQ ID NO: 2580 - protein, 242 aa, Artificial Sequence
  source: /note="Description of Artificial Sequence: Synthetic polypeptide"
DVVMTQSPAFLSVTPGEKVTITCRASKSISKDLAWYQQKPDQAPKLLIYSGSTLQSGVPSRFSGSGSGTDFTFTISSLEAEDAATYYCQQHNKYPYTFGGGTKVEIKGGGGSGGGGSGGGGSGGGGSEVQLVQSGAEVKKPGESLRISCKGSGYTFTSYWMNWVRQMPGKGLEWMGRIDPYDSETHYNQKFKDHVTISVDKSISTAYLQWSSLKASDTAMYYCARGNWDDYWGQGTTVTVSS

SEQ ID NO: 2581 - protein, 242 aa, Artificial Sequence
  source: /note="Description of Artificial Sequence: Synthetic polypeptide"
DVVMTQSPDSLAVSLGERATINCRASKSISKDLAWYQQKPGQPPKLLIYSGSTLQSGVPDRFSGSGSGTDFTLTISSLQAEDVAVYYCQQHNKYPYTFGGGTKVEIKGGGGSGGGGSGGGGSGGGGSEVQLVQSGAEVKKPGESLRISCKGSGYTFTSYWMNWVRQMPGKGLEWMGRIDPYDSETHYNQKFKDHVTISVDKSISTAYLQWSSLKASDTAMYYCARGNWDDYWGQGTTVTVSS

SEQ ID NO: 2582 - protein, 242 aa, Artificial Sequence
  source: /note="Description of Artificial Sequence: Synthetic polypeptide"
EVQLVESGGGLVQPGGSLRLSCAASGYTFTSYWMNWVRQAPGKGLVWVSRIDPYDSETHYNQKFKDRFTISVDKAKSTAYLQMNSLRAEDTAVYYCARGNWDDYWGQGTTVTVSSGGGGSGGGGSGGGGSGGGGSDVQLTQSPSFLSASVGDRVTITCRASKSISKDLAWYQQKPGKAPKLLIYSGSTLQSGVPSRFSGSGSGTEFTLTISSLQPEDFATYYCQQHNKYPYTFGGGTKVEIK

SEQ ID NO: 2583 - protein, 242 aa, Artificial Sequence
  source: /note="Description of Artificial Sequence: Synthetic polypeptide"
EVQLVESGGGLVQPGGSLRLSCAASGYTFTSYWMNWVRQAPGKGLVWVSRIDPYDSETHYNQKFKDRFTISVDKAKSTAYLQMNSLRAEDTAVYYCARGNWDDYWGQGTTVTVSSGGGGSGGGGSGGGGSGGGGSEVVLTQSPATLSLSPGERATLSCRASKSISKDLAWYQQKPGQAPRLLIYSGSTLQSGIPARFSGSGSGTDFTLTISSLEPEDFAVYYCQQHNKYPYTFGGGTKVEIK

SEQ ID NO: 2584 - protein, 242 aa, Artificial Sequence
  source: /note="Description of Artificial Sequence: Synthetic polypeptide"
EVQLVESGGGLVQPGGSLRLSCAASGYTFTSYWMNWVRQAPGKGLVWVSRIDPYDSETHYNQKFKDRFTISVDKAKSTAYLQMNSLRAEDTAVYYCARGNWDDYWGQGTTVTVSSGGGGSGGGGSGGGGSGGGGSDVVMTQSPAFLSVTPGEKVTITCRASKSISKDLAWYQQKPDQAPKLLIYSGSTLQSGVPSRFSGSGSGTDFTFTISSLEAEDAATYYCQQHNKYPYTFGGGTKVEIK

SEQ ID NO: 2585 - protein, 242 aa, Artificial Sequence
  source: /note="Description of Artificial Sequence: Synthetic polypeptide"
EVQLVESGGGLVQPGGSLRLSCAASGYTFTSYWMNWVRQAPGKGLVWVSRIDPYDSETHYNQKFKDRFTISVDKAKSTAYLQMNSLRAEDTAVYYCARGNWDDYWGQGTTVTVSSGGGGSGGGGSGGGGSGGGGSDVVMTQSPDSLAVSLGERATINCRASKSISKDLAWYQQKPGQPPKLLIYSGSTLQSGVPDRFSGSGSGTDFTLTISSLQAEDVAVYYCQQHNKYPYTFGGGTKVEIK

SEQ ID NO: 2586 - protein, 242 aa, Artificial Sequence
  source: /note="Description of Artificial Sequence: Synthetic polypeptide"
DVQLTQSPSFLSASVGDRVTITCRASKSISKDLAWYQQKPGKAPKLLIYSGSTLQSGVPSRFSGSGSGTEFTLTISSLQPEDFATYYCQQHNKYPYTFGGGTKVEIKGGGGSGGGGSGGGGSGGGGSEVQLVESGGGLVQPGGSLRLSCAASGYTFTSYWMNWVRQAPGKGLVWVSRIDPYDSETHYNQKFKDRFTISVDKAKSTAYLQMNSLRAEDTAVYYCARGNWDDYWGQGTTVTVSS

SEQ ID NO: 2587 - protein, 242 aa, Artificial Sequence
  source: /note="Description of Artificial Sequence: Synthetic polypeptide"
EVVLTQSPATLSLSPGERATLSCRASKSISKDLAWYQQKPGQAPRLLIYSGSTLQSGIPARFSGSGSGTDFTLTISSLEPEDFAVYYCQQHNKYPYTFGGGTKVEIKGGGGSGGGGSGGGGSGGGGSEVQLVESGGGLVQPGGSLRLSCAASGYTFTSYWMNWVRQAPGKGLVWVSRIDPYDSETHYNQKFKDRFTISVDKAKSTAYLQMNSLRAEDTAVYYCARGNWDDYWGQGTTVTVSS

SEQ ID NO: 2588 - protein, 242 aa, Artificial Sequence
  source: /note="Description of Artificial Sequence: Synthetic polypeptide"
DVVMTQSPAFLSVTPGEKVTITCRASKSISKDLAWYQQKPDQAPKLLIYSGSTLQSGVPSRFSGSGSGTDFTFTISSLEAEDAATYYCQQHNKYPYTFGGGTKVEIKGGGGSGGGGSGGGGSGGGGSEVQLVESGGGLVQPGGSLRLSCAASGYTFTSYWMNWVRQAPGKGLVWVSRIDPYDSETHYNQKFKDRFTISVDKAKSTAYLQMNSLRAEDTAVYYCARGNWDDYWGQGTTVTVSS

SEQ ID NO: 2589 - protein, 242 aa, Artificial Sequence
  source: /note="Description of Artificial Sequence: Synthetic polypeptide"
DVVMTQSPDSLAVSLGERATINCRASKSISKDLAWYQQKPGQPPKLLIYSGSTLQSGVPDRFSGSGSGTDFTLTISSLQAEDVAVYYCQQHNKYPYTFGGGTKVEIKGGGGSGGGGSGGGGSGGGGSEVQLVESGGGLVQPGGSLRLSCAASGYTFTSYWMNWVRQAPGKGLVWVSRIDPYDSETHYNQKFKDRFTISVDKAKSTAYLQMNSLRAEDTAVYYCARGNWDDYWGQGTTVTVSS
